(19) United States
(12) Patent Application Publication
(10) Pub. No.: US 2021/0284695 A1
(43) Pub. Date: Sep. 16, 2021

(54) FOLDED AND PROTEASE-RESISTANT POLYPEPTIDES

(71) Applicant: UNIVERSITY OF WASHINGTON, Seattle, WA (US)

(72) Inventors: Gabriel Jacob ROCKLIN, Seattle, WA (US); David BAKER, Seattle, WA (US)

(21) Appl. No.: 16/489,044

(22) PCT Filed: Apr. 27, 2018
(86) PCT No.: PCT/US2018/029904

§ 371 Date: Aug. 27, 2019

Related U.S. Application Data
(60) Provisional application No. 62/491,518, filed on Apr. 28, 2017.

(51) Int. Cl. C07K 14/00; C12N 15/10

(52) U.S. Cl. CPC C07K 14/00; C12N 15/1037; C12N 15/1068

(57) ABSTRACT

Non-naturally occurring polypeptides are disclosed that include (a) 3-3 secondary structure elements, wherein each secondary structure element is either an α-helix (H domain) of between 10-20 amino acid residues in length or a β-strand (E domain) of between 3-10 amino acid residues in length; and (b) 2-4 linkers of between 2 to 6 amino acid residues in length connecting adjacent secondary structure elements; wherein the polypeptide is between 25-50 amino acid residues in length; and wherein the polypeptide includes no cysteine residues.

### CROSS REFERENCE

[0001] This application claims priority to U.S. Provisional Patent Application Ser. No. 62/491,518 filed Apr. 28, 2017, incorporated by reference herein in its entirety.

### BACKGROUND

[0002] Proteins fold into unique native structures stabilized by thousands of weak interactions that collectively overcome the entropic cost of folding. Though these forces are “encoded” in the thousands of known protein structures, “decoding” them is challenging due to the complexity of natural proteins that have evolved for function, not stability.

[0003] The key challenge to achieving a quantitative understanding of the sequence determinants of protein folding is to accurately and efficiently model the balance between the many forces contributing to the free energy of folding. Mutagenesis has been the primary experimental tool for interrogating the balance of forces contributing to stability, but the results are context-dependent and do not provide a global view of the contributions to stability. Molecular dynamics simulations on minimal proteins do not reveal which interactions specify and stabilize the native structure, and cannot in general determine whether a given sequence will fold into a stable structure.

### SUMMARY OF THE INVENTION

[0004] In one aspect, non-naturally occurring polypeptides are provided, comprising

[0005] (a) 3-5 secondary structure elements, wherein each secondary structure element is either an α-helix (H domain) of between 10-20 amino acid residues in length or a β-strand (E domain) of between 3-10 amino acid residues in length; and

[0006] (b) 2-4 linkers of between 2 to 6 amino acid residues in length connecting adjacent secondary structure elements;

[0007] wherein the polypeptide is between 25-50 amino acid residues in length; and

[0008] wherein the polypeptide includes no cysteine residues.

[0009] In one embodiment, each H domain is independently between 10-15 amino acids in length. In another embodiment, each E domain is independently between 3-7 amino acids in length. In a further embodiment, the polypeptide is between 30-50, 35-50, 35-45, 40-45, or 40-43 amino acid residues in length. In another embodiment, the polypeptide comprises a secondary structure element arrangement selected from the group consisting of HHH, EHEE, HEEH, and EEHEE. In various embodiments, the polypeptide comprises an amino acid sequence having at least at least 35%, 40%, 45%, 50%, 55%, 60%, 65%, 70%, 75%, 80%, 85%, 90%, 91%, 92%, 93%, 94%, 95%, 96%, 97%, 98%, 99%, or 100% identical along its length to the amino acid sequence of any one of SEQ ID NOS: 1-4000, or a mirror image thereof. Also provided are isolated nucleic acids encoding the polypeptide of any embodiment herein, recombinant expression vectors comprising the isolated nucleic acids linked to a promoter, and recombinant host cells comprising the recombinant expression vectors disclosed herein.

[0010] Also provided herein are methods comprising:

[0011] (a) using a computing device to construct a library of proteins, wherein the computing device designs a sequence to stabilize the backbone of the protein, and wherein the proteins comprise less than about 50 amino acids;

[0012] (b) synthesizing the proteins using next-generation gene synthesis;

[0013] (c) expressing the proteins in yeast so that every cell displays many copies of one protein sequence on its surface; and

[0014] (d) screening the library of proteins for susceptibility to digestion by protease.

[0015] In one embodiment, the synthesizing step comprises oligo library synthesis technology, capable of parallel synthesis of 10⁴-10⁵ arbitrarily specified DNA sequences long enough to encode the proteins. In another embodiment, in the screening step, cells are incubated with varying concentrations of protease, those displaying resistant proteins are isolated by fluorescence-activated cell sorting (FACS), and the frequencies of each protein at each protease concentration are determined by deep sequencing. In a further embodiment, the method further comprising assigning each protein a stability score, wherein the stability score comprises: the difference between the measured EC₅₀ and the predicted EC₅₀ in the unfolded state of the protein, according to a sequence-based model parameterized using EC₅₀ measurements of scrambled sequences. In one embodiment, a stability score of 1 corresponds to a 10-fold higher EC₅₀ than the predicted EC₅₀ in the unfolded state. In another embodiment, the library comprises 1,000 to 30,000 proteins.

### DESCRIPTION OF THE FIGURES

[0016] FIG. 1. Yeast display enables massively parallel measurement of protein stability. (A) Each yeast cell displays many copies of one test protein fused to Aga2. The c-terminal c-Myc tag is labeled with a fluorescent antibody. Protease cleavage of the test protein (or other cleavage) leads to loss of the tag and loss of fluorescence. (B) Libraries of 10⁴ unique sequences are sorted by flow cytometry. Most cells show high protein expression (measured by fluorescence) before proteolysis (blue). Only some cells retain fluorescence after proteolysis; those above a threshold (shaded green region) are collected for deep sequencing analysis. (C) Sequential sorting at increasing protease concentrations separates proteins by stability. Each sequence in a library of 19,726 proteins is shown as a grey line tracking the change in population fraction (enrichment) of that sequence, normalized to each sequence's population in the starting (pre-selection) library. Enrichment traces for seven proteins at different stability levels are highlighted in color. (D) EC₅₀s for the seven highlighted proteins in (C) are plotted on top of the overall density of the 46,187 highest-confidence EC₅₀ measurements from design rounds 1-4. (E) Same data as at left, showing that stability scores (EC₅₀ values corrected for intrinsic proteolysis rates) correlate better than raw EC₅₀s between the proteases. (F-I) Stability scores measured in high-throughput correlate with individual folding stability measurements for mutants of four small proteins. The wild-type sequence in each set is highlighted as a red circle. Confidence intervals for all EC₅₀ measurements are provided in supplementary materials. (F) Pin1 ΔG_{unf} data at 40° C. from (28) by thermal denaturation (G) hYAP65 Tm data from (5, 10)(H) Villin HP35 ΔG_{unf} data at 25° C. from (7, 11) by urea denaturation (1) BBL ΔG_{unf} data at 10° C. from (8) by thermal denaturation.

[0017] FIG. 2. Biophysical characterization of designed minimal proteins. (A) Design models and NMR solution ensembles for designed minimal proteins. (B) Far-ultraviolet circular dichroism (CD) spectra at 25° C. (black), 95° C. (red), and 25° C. following melting (blue). (C) Thermal melting curves measured by CD at 220 nm. Melting temperatures determined using the derivative of the curve. (D) Chemical denaturation in GuHCl measured by CD at 220 nm and 25° C. Unfolding free energies determined by fitting to a two-state model (red solid line).

### DETAILED DESCRIPTION OF THE INVENTION

[0018] All references cited are herein incorporated by reference in their entirety.

[0019] As used herein, the singular forms “a”, “an” and “the” include plural referents unless the context clearly dictates otherwise. “And” as used herein is interchangeably used with “or” unless expressly stated otherwise.

[0020] As used herein, the amino acid residues are abbreviated as follows: alanine (Ala; A), asparagine (Asn; N), aspartic acid (Asp; D), arginine (Arg; R), cysteine (Cys; C), glutamic acid (Glu; E), glutamine (Gin; Q), glycine (Gly; G), histidine (His; H), isoleucine (Ile; I), leucine (Leu; L), lysine (Lys; K), methionine (Met; M), phenylalanine (Phe; F), proline (Pro; P), serine (Ser; S), threonine (Thr; T), tryptophan (Trp; W), tyrosine (Tyr; Y), and valine (Val; V).

[0021] All embodiments of any aspect of the invention can be used in combination, unless the context clearly dictates otherwise.

[0022] In one aspect, the invention provides non-naturally occurring polypeptides comprising or consisting of:

[0023] (a) 3-5 secondary structure elements, wherein each secondary structure element is either an α-helix (H domain) of between 10-20 amino acid residues in length or a β-strand (E domain) of between 3-10 amino acid residues in length; and

[0024] (b) 2-4 linkers of between 2 to 6 amino acid residues in length connecting adjacent secondary structure elements;

[0025] wherein the polypeptide is between 25-50 amino acid residues in length; and

[0026] wherein the polypeptide includes no cysteine residues.

[0027] As demonstrated in the examples, the inventors have developed computational methods for de novo design of non-naturally occurring folded protease-resistant peptides that do not include cysteine residues and thus do not rely on disulfide bonds for stability, and the use of these methods to design a large number of exemplary 25-50 residue constrained peptides. The stable polypeptides disclosed herein provide robust starting scaffolds for generating peptides that bind targets of interest using computational interface design or experimental selection methods. Solvent-exposed hydrophobic residues can be introduced without impairing folding or solubility, suggesting high mutational tolerance. Hence it should be possible to reengineer the peptide surfaces, incorporating target-binding residues to construct binders, agonists, or inhibitors.

[0028] As used herein, a β-sheet secondary structure element comprises β strands connected laterally by backbone hydrogen bonds. As used herein, an α-helix secondary structure element is a right-handed or left-handed (when D amino acids are involved) helix in which backbone amine groups donate a hydrogen bond to backbone carbonyl groups of amino acids 3-4 residues before it along the primary amino acid sequence of the polypeptide. In various embodiments, the polypeptide comprises or consists of 3-5, 3-4, 4-5, 3, 4, or 5 secondary structure elements. In various non-limiting embodiments, the secondary structure element arrangement of the polypeptide may be selected from the group consisting of HHH, EHE, EEH, HEE, HEEE, EEHE, EHEE, EEEH, HEEH, and EEHEE, wherein H is a helix and E is a beta strand. In specific embodiments, structure element arrangement of the polypeptide may be selected from the group consisting of HHH, EHEE, HEEH, and EEHEE.

[0029] In various embodiments, each E domain is independently between 3-10, 3-9, 3-8, 3-7, 4-10, 4-9, 4-8, 4-7, 4-6, 4-5, 5-10, 5-9, 5-8, 5-7, 5-6, 6-10, 6-9, 6-8, 6-7, 7-10, 7-9, 7-8, 8-10, 8-9, 9-10, 3, 4, 5, 6, 7, 8, 9, or 10 amino acid residues in length. In a specific embodiment, each E domain is independently 3-7 amino acids in length. In one embodiment, each E domain in the polypeptide is the same length; in another embodiment, not all E domains in the polypeptide are the same length.

[0030] In other embodiments, each H domain is independently between 10-20, 10-19, 10-18, 10-17, 10-16, 10-15, 10-14, 10-13, 10-12, 10-11, 11-20, 11-19, 11-18, 11-17, 11-16, 11-15, 11-14, 11-13, 11-12, 12-20, 12-19, 12-18, 12-17, 12-16, 12-15, 12-14, 12-13, 13-20, 13-19, 13-18, 13-17, 13-16, 13-15, 13-14, 14-20, 14-19, 14-18, 14-17, 14-16, 14-15, 15-20, 15-19, 15-18, 15-17, 15-16, 16-20, 16-19, 16-18, 16-17, 17-20, 17-19, 17-18, 18-20, 18-19, 19-20, 10, 11, 12, 13, 14, 15, 16, 17, 18, 19, or 20 amino acid residues in length. In a specific embodiment, each H domain is independently between 10-15 amino acid residues in length. In one embodiment, each H domain in the polypeptide is the same length; in another embodiment, not all H domains in the polypeptide are the same length.

[0031] The linkers serve to appropriately space adjacent secondary structure elements. The polypeptides may comprise 2-4, 2-3, 3-4, 2, 3, or 4 linkers. In further embodiments, each linker is independently 2-6, 2-5, 2-4, 2-3, 3-6, 3-5, 3-4, 4-6, 4-5, 5-6, 2, 3, 4, 5, or 6 amino acids in length. In one embodiment, each linker in the polypeptide is the same length; in another embodiment, not all linkers in the polypeptide are the same length. The linkers may be of any suitable amino acid sequence, and each linker in a given polypeptide may be the same or different.

[0032] In various further embodiments, the polypeptide is 25-50, 30-50, 35-50, 40-50, 45-50, 25-45, 30-45, 35-45, 40-45, 25-40, 30-40, 35-40, 25-35, 30-35, 25-30, or 40-43 amino acid residues in length.

[0033] As used throughout the present application, the term “polypeptide” is used in its broadest sense to refer to a sequence of subunit amino acids. The polypeptides of the invention may comprise glycine, L-amino acids, D-amino acids (which are resistant to L-amino acid-specific proteases in vivo), or a combination of glycine and D- and L-amino acids. As disclosed herein, L-amino acids and glycine are shown in upper case letters, and D-amino acids are shown in lower case letters.

[0034] In another embodiment, the polypeptide is at least 30% identical along its entire length to the amino acid sequence of any one of SEQ ID NOS: 1-4000, or a mirror image thereof (i.e.: L amino acids substituted with D amino acids). In various further embodiments, the polypeptide is at least 35%, 40%, 45%, 50%, 55%, 60%, 65%, 70%, 75%, 80%, 85%, 90%, 91%, 92%, 93%, 94%, 95%, 96%, 97%, 98%, 99%, or 100% identical along its length to the amino acid sequence of any one of SEQ ID NOS: 1-4000, or a mirror image thereof.

[0035] The polypeptides described herein may be chemically synthesized or recombinantly expressed (when the polypeptide is genetically encodable). The polypeptides may be linked to other compounds to promote an increased half-life in vivo, such as by PEGylation, HESylation, PASylation, glycosylation, or may be produced as an Fc-fusion or in deimmunized variants. Such linkage can be covalent or non-covalent.

[0036] The polypeptides of the invention may include additional residues at the N-terminus, C-terminus, or both that are not present in the polypeptides of the invention; these additional residues are not included in determining the percent identity of the polypeptides of the invention relative to the reference polypeptide.

[0037] As shown in the examples that follow, the specific primary amino acid sequence is not a critical determinant of maintaining the structure of the constrained peptide. Thus, the polypeptides disclosed herein may be substituted with conservative or non-conservative substitutions. In one embodiment, changes from the reference polypeptide may be conservative amino acid substitutions. As used herein, “conservative amino acid substitution” means an amino acid substitution that does not alter or substantially alter polypeptide function or other characteristics. In one such embodiment, L amino acids are substituted with other L-amino acids, D amino acids are substituted with other L amino acids, and glycine may be substituted with L or D amino acids, preferably with D amino acids.

[0038] In other embodiments, a given amino acid can be replaced by a residue having similar physiochemical characteristics, e.g., substituting one aliphatic residue for another (such as Ile, Val, Leu, or Ala for one another), or substitution of one polar residue for another (such as between Lys and Arg; Glu and Asp; or Gin and Asn). Other such conservative substitutions, e.g., substitutions of entire regions having similar hydrophobicity characteristics, are known. Polypeptides comprising conservative amino acid substitutions can be tested in any one of the assays described herein to confirm that a desired activity, e.g. antigen-binding activity and specificity of a native or reference polypeptide is retained. Amino acids can be grouped according to similarities in the properties of their side chains (in A. L. Lehninger, in Biochemistry, second ed., pp. 73-75, Worth Publishers, New York (1975)): (1) non-polar: Ala (A), Val (V), Leu (L), Ile (I), Pro (P), Phe (F), Trp (W), Met (M); (2) uncharged polar: Gly (G), Ser (S), Thr (T), Cys (C), Tyr (Y), Asn (N), Gin (Q); (3) acidic: Asp (D), Glu (E); (4) basic: Lys (K), Arg (R), His (H). Alternatively, naturally occurring residues can be divided into groups based on common side-chain properties: (1) hydrophobic: Norleucine, Met, Ala, Val, Leu, Ile; (2) neutral hydrophilic: Cys, Ser, Thr, Asn, Gin; (3) acidic: Asp, Glu; (4) basic: His, Lys, Arg; (5) residues that influence chain orientation: Gly, Pro; (6) aromatic: Trp, Tyr, Phe. Non-conservative substitutions will entail exchanging a member of one of these classes for another class. Particular conservative substitutions include, for example; Ala into Gly or into Ser; Arg into Lys; Asn into Gin or into H is; Asp into Glu; Cys into Ser; Gin into Asn; Glu into Asp; Gly into Ala or into Pro; His into Asn or into Gin; lie into Leu or into Val; Leu into Ile or into Val; Lys into Arg, into Gin or into (flu; Met into Leu, into Tyr or into lie; Phe into Met, into leu or into Tyr, Ser into Thr; Thr into Ser; Trp into Tyr; Tyr into Trp; and/or Phe into Val, into Ile or into Leu. In one embodiment, polar residues (DEHKNQRST) are more mutable than the other residues.

[0039] As noted above, the polypeptides of the invention may include additional residues at the N-terminus, C-terminus, or both. Such residues may be any residues suitable for an intended use, including but not limited to detection tags (i.e.: fluorescent proteins, antibody epitope tags, etc.), adaptors, ligands suitable for purposes of purification (His tags, etc.), and peptide domains that add functionality to the polypeptides.

[0040] In a further aspect, the present invention provides isolated nucleic acids encoding a polypeptide of the present invention that can be genetically encoded. The isolated nucleic acid sequence may comprise RNA or DNA. As used herein, “isolated nucleic acids” are those that have been removed from their normal surrounding nucleic acid sequences in the genome or in cDNA sequences. Such isolated nucleic acid sequences may comprise additional sequences useful for promoting expression and/or purification of the encoded protein, including but not limited to polyA sequences, modified Kozak sequences, and sequences encoding epitope tags, export signals, and secretory signals, nuclear localization signals, and plasma membrane localization signals. It will be apparent to those of skill in the art, based on the teachings herein, what nucleic acid sequences will encode the polypeptides of the invention.

[0041] In another aspect, the present invention provides recombinant expression vectors comprising the isolated nucleic acid of any aspect of the invention operatively linked to a suitable control sequence. “Recombinant expression vector” includes vectors that operatively link a nucleic acid coding region or gene to any control sequences capable of effecting expression of the gene product. “Control sequences” operably linked to the nucleic acid sequences of the invention are nucleic acid sequences capable of effecting the expression of the nucleic acid molecules. The control sequences need not be contiguous with the nucleic acid sequences, so long as they function to direct the expression thereof. Thus, for example, intervening untranslated yet transcribed sequences can be present between a promoter sequence and the nucleic acid sequences and the promoter sequence can still be considered “operably linked” to the coding sequence. Other such control sequences include, but are not limited to, polyadenylation signals, termination signals, and ribosome binding sites. Such expression vectors include but not limited to, plasmid and viral-based expression vectors. The control sequence used to drive expression of the disclosed nucleic acid sequences in a mammalian system may be constitutive (driven by any of a variety of promoters, including but not limited to, CMV, SV40, RSV, actin, EF) or inducible (driven by any of a number of inducible promoters including, but not limited to, tetracycline, ecdysone, steroid-responsive). The expression vector must be replicable in the host organisms either as an episome or by integration into host chromosomal DNA. In various embodiments, the expression vector may comprise a plasmid, viral-based vector, or any other suitable expression vector.

[0042] In a further aspect, the present invention provides host cells that comprise the recombinant expression vectors disclosed herein, wherein the host cells can be either prokaryotic or eukaryotic. The cells can be transiently or stably engineered to incorporate the expression vector of the invention, using standard techniques in the art, including but not limited to standard bacterial transformations, calcium phosphate co-precipitation, electroporation, or liposome mediated-, DEAE dextran mediated-, polycationic mediated-, or viral mediated transfection. (See, for example, Molecular Cloning: A Laboratory Manual (Sambrook, et al., 1989, Cold Spring Harbor Laboratory Press; Culture of Animal Cells: A Manual of Basic Technique, 2^{nd} Ed. (R. I. Freshney. 1987. Liss, Inc. New York, N.Y.). A method of producing a polypeptide according to the invention is an additional part of the invention. The method comprises the steps of (a) culturing a host according to this aspect of the invention under conditions conducive to the expression of the polypeptide, and (b) optionally, recovering the expressed polypeptide. The expressed polypeptide can be recovered from the cell free extract, but preferably they are recovered from the culture medium.

[0043] Also provided are methods, comprising:

[0044] (a) using a computing device to construct a library of proteins, wherein the computing device designs a sequence to stabilize the backbone of the protein, and wherein the proteins comprise less than about 50 amino acids;

[0045] (b) synthesizing the proteins using next-generation gene synthesis;

[0046] (c) expressing the proteins in yeast so that every cell displays many copies of one protein sequence on its surface; and

[0047] (d) screening the library of proteins for susceptibility to digestion by protease.

[0048] Here we combine computational protein design, next-generation gene synthesis, and a high-throughput protease susceptibility assay to measure folding and stability for over 15,000 de novo designed miniproteins, 1,500 natural proteins, 10,000 point-mutants, and 30,000 negative control sequences, identifying over 2,500 new stable designed proteins in four basic folds. This scale—three orders of magnitude greater than that of previous studies of design or folding-enabled us to systematically examine how sequence determines folding and stability in uncharted protein space. Iteration between design and experiment increased the design success rate from 6% to 47%, produced stable proteins unlike those found in nature for topologies where design was initially unsuccessful, and revealed subtle contributions to stability as designs became increasingly optimized. Our approach achieves the long-standing goal of a tight feedback cycle between computation and experiment, and promises to transform computational protein design into a data-driven science.

[0049] In one embodiment, the synthesizing step comprises oligo library synthesis technology capable of parallel synthesis of 10⁴-10⁵ arbitrarily specified DNA sequences long enough to encode the proteins. In another embodiment, in the screening step, cells are incubated with varying concentrations of protease, those displaying resistant proteins are isolated by fluorescence-activated cell sorting (FACS), and the frequencies of each protein at each protease concentration are determined by deep sequencing. In a further embodiment, the method further comprising assigning each protein a stability score, wherein the stability score comprises: the difference between the measured EC₅₀ and the predicted EC₅₀ in the unfolded state of the protein, according to a sequence-based model parameterized using EC₅₀ measurements of scrambled sequences. In another embodiment, a stability score of 1 corresponds to a 10-fold higher EC₅₀ than the predicted EC₅₀ in the unfolded state. In a further embodiment, the library comprises 1,000 to 30,000 proteins.

### Examples

[0050] Here we present a new synthetic approach to examine the determinants of protein folding by exploring the space of potential minimal proteins using de novo computational protein design on a three order of magnitude larger scale. To enable this new scale, both DNA synthesis and protein stability measurements are parallelized. To encode our designs, we employ oligo library synthesis technology (22), originally developed for transcriptional profiling and large gene assembly applications, and now capable of parallel synthesis of 10⁴-10⁵ arbitrarily specified DNA sequences long enough to encode short proteins. To assay designs for stability, we expressed these libraries in yeast so that every cell displays many copies of one protein sequence on its surface, genetically fused to an expression tag that can be fluorescently labeled (23)(FIG. 1A). Cells were then incubated with varying concentrations of protease, those displaying resistant proteins were isolated by FACS (FIG. 1B), and the frequencies of each protein at each protease concentration were determined by deep sequencing (FIG. 1C). We then inferred protease EC₅₀ values for each sequence from these data by modeling the complete selection procedure (FIG. 1D, details given in Methods). Finally, each design was assigned a “stability score” (FIG. 1E): the difference between the measured EC₅₀ and the predicted EC₅₀ in the unfolded state, according to a sequence-based model parameterized using EC₅₀ measurements of scrambled sequences. A stability score of 1 corresponds to a 10-fold higher EC₅₀ than the predicted EC₅₀ in the unfolded state. The amino acid sequences of peptides developed herein are provided as SEQ ID NOs: 1-4000 in the accompanying sequence listing.

### Massively Parallel Measurement of Folding Stability

[0051] Proteolysis assays have been previously used to measure stability for individual sequences (24) and to select for stable sequences in a proteome (25) or combinatorial library (26, 27), but this approach has not been applied to date to quantify stability for all sequences in a library. To evaluate the ability of the assay to measure stability on a large scale, we obtained a synthetic DNA library encoding four small proteins (pin1 WW-domain (28), hYAP65 WW-domain (5, 10), villin HP35 (7, 11), and BBL (8)) and 116 mutants of these proteins that have been previously characterized thermodynamically using experiments on purified material. The library also contained 19,610 unrelated sequences, and all sequences were assayed for stability simultaneously as described. Although the stability score is not a directly analog of a thermodynamic parameter, stability scores measured with trypsin and separately measured with chymotrypsin were each well-correlated with folding free energies (or melting temperatures) for all four sets of mutants, with r² values ranging from 0.63 to 0.85 (FIG. 1 F-I). Most mutants in this dataset were predicted to have similar unfolded state EC₅₀ values to their parent sequences, so the relative stability scores of the mutants are very similar to their relative EC₅₀ values. In the case of villin assayed with chymotrypsin, the unfolded state model improved the correlation between protease resistance and folding free energy from r²=0.46 (using raw EC₅₀ values) to the reported r²=0.77 by correcting for the effect mutations such as K70M and F51L have on intrinsic chymotrypsin cleavage rates. The mutual agreement between trypsin results, chymotrypsin results, and experiments on purified protein indicate that the assay provides a robust measure of folding stability for small proteins.

### Massively Parallel Testing of Designed Miniproteins

[0052] We selected four protein topologies (ααα, βαββ, αββα, and ββαββ) as initial design targets. These topologies have increasing complexity: the ααα topology features only two linkers and exclusively local secondary structure (helices); the ββαββ fold requires four linkers and features a mixed parallel/antiparallel β-sheet bridging the N- and C-termini. Of these topologies, only ααα proteins have been found in nature within the target size range of 40-43 residues; no proteins have been previously designed in any of the four topologies at this size (excluding designed ααα and βαββ proteins stabilized by multiple disulfide linkages (29)). For each topology, we first designed between 5,000 and 40,000 de novo proteins using a blueprint-based approach. Each design has its own unique three-dimensional main chain conformation and its own unique sequence predicted to be near-optimal for that conformation. We then selected 1,000 designs per topology for experimental testing by ranking the designs by a weighted sum of their computed energies and additional filtering terms [see Methods: Protein design]. The median sequence identity between any pair of tested designs of the same topology ranged from 15-35%, and designs were typically no more than 40-65% identical to any other design. For each design, we also included two control sequences in our library: one made by scrambling the order of amino acids in that design (preserving the overall amino acid composition), and a second made by scrambling the order while preserving both the composition and the hydrophobic or polar character at each position. This library comprised 12,459 unique sequences in total: 4,153 designed proteins and 8,306 control sequences. The designed proteins are named using their secondary structure topology (using H for α-helix and E for β-strand), their design round, and a design number.

[0053] We assayed the sequence library for stability using both chymotrypsin and trypsin. To stringently identify stable designs, we ranked sequences by the lower of their trypsin stability score or their chymotrypsin stability score, referred to simply as their stability score from here on. The fully scrambled sequences and patterned scrambled sequences had similar stability score distributions; most of these controls had stability scores below 0.5, and only one had a score greater than 1.0. In contrast, 206 designed sequences had stability scores above 1.0. Most of these (195/206) were ααα designs (both left-hand and right-handed bundles); the remaining 11 were βαββ. The clustering of the 206 most stable designs around the ααα topology, and the high stability of designed sequences compared with chemically identical control sequences, strongly suggests these stable designs fold into their designed structures. To examine this further, we selected six stable designs (four ααα and two βαββ) for E. coli expression, purification, and further characterization by size-exclusion chromatography (SEC) and circular dichroism spectroscopy (CD). All six designs eluted from SEC as expected for a 5-7 kDa monomer, and the CD spectra were consistent with the designed secondary structure. Five of the six designs had clear, cooperative melting transitions, re-folded reversibly and were highly stable for minimal proteins: all had melting temperatures above 70° C., and the βαββ design EHEE_rd1_0284 (TQTQEFDNEEEARKAEKELRKENRRVTVTQENGRWRVTWD; SEQ ID: 702) had only partially melted at 95° C. (ΔG_{unf}=4.7 kcal/mol, FIG. 2D; the sixth design HHH_rd1_0005 (PDKKKKIVKKLLNKGLDKSEVEKEARKNGISDDIVEQAYKEWL; SEQ ID NO:2669) did not refold and showed signs of aggregation. We determined solution structures for EHEE_rd1_0284 (SEQ ID NO:702) and the left-handed ααα design HHH_rd1_0142 (RKWEEIAERLREEFNINPEEAREAVEKAGiNEEEARRIVKKRL; SEQ ID NO:652) by NMR; each structure closely matched the design model (FIG. 2A. In sum, both high-throughput control experiments and low-throughput characterization of individual proteins indicate that the protease resistant designs fold as designed.

### Global Determinants of Stability

[0054] This unprecedentedly large set of stable and unstable minimal proteins with varying physical properties enabled us to quantitatively examine which protein features correlated with folding. We computed over 60 structural and sequence-based metrics and examined which metrics differed between the 195 most stable ααα designs (stability score >1.0, considered to be design successes) and the 664 remaining ααα designs (considered to be failures) using the K-S 2-sample test. Significant differences indicate that a particular metric captures an important contribution to protein stability, and that this contribution was poorly optimized among the tested designs.

[0055] The dominant difference between stable and unstable ααα designs was the total amount of buried nonpolar surface area (NPSA) from hydrophobic amino acids. Stable designs buried more NPSA than did unstable designs (p<5e-38), and none of the 95 designs below 32 Å²/residue were stable. Above this threshold, the success rate (successful designs/tested designs) steadily increased as buried NPSA increased. Stable designs also had better agreement between their sequences and their local structures as assessed by quantifying the geometric similarity (in Å of RMSD) between 9-residue long fragments of the designs and 9-residue long fragments of natural proteins similar in local sequence to the designed fragment (see Methods: Fragment analysis). Fragments of stable designs were more geometrically similar to fragments of natural proteins of similar local sequence, while fragments of unstable designs were more geometrically distant from the fragments of natural proteins matching their local sequence (p<2e-26). Other metrics were only weakly correlated with success despite substantial variability among designs, including different measures of amino acid packing density, and the total Rosetta energy itself. Although local sequence-structure agreement and especially buried NPSA are well known to be important for protein stability, it is very challenging to determine the precise strength of these contributions at a global level in the complex balance of all the energies influencing protein structure. Our results directly demonstrate how specific imbalances led to selection of hundreds of unstable designs, and our data and approach provide a completely new route to refining this balance in biophysical modeling.

### Iterative, Data-Driven Protein Design

[0056] We sought to use these findings to increase the success rate of protein design, both by changing the design procedure to increase buried NPSA and by re-weighting the metrics used to select designs for testing (see Methods: Protein design). Using the improved design and ranking procedure, we built a second generation of 4,150 designs, along with two control sequences per design: a pattern-preserving scrambled sequence as before (now also preserving Gly and Pro positions), and a second control identical to the designed sequence, but with the most buried side chain (according to the design model) replaced with aspartate. As in Round 1, almost no scrambled sequences had stability scores above 1 (our cutoff defining success) despite the increased hydrophobicity of the scrambled sequences. However, a much greater fraction of second-generation designs proved stable: success for ααα designs improved from 23% to 69%, βαββ designs improved from 1% to 11% successful, and we also obtained 7 stable αββα designs and one stable ββαββ design. These increases demonstrate how iterative, high-throughput protein design can make concrete improvements in design and modeling. Nearly all stable designs were destabilized via the single buried Asp substitution: the median drop in stability score for these designs was 1.1, and only 33 buried Asp controls had stability scores >1.0 compared with 271 designs. This significant destabilization from a single designed substitution provides further large-scale evidence that the stable designs fold into their designed structures. We purified and characterized seven second-generation proteins by SEC and CD, all of which (including three αββα designs and one ββαββ design) were monomeric, displayed their designed secondary structure in CD, were folded cooperatively, and re-folded reversibly after thermal denaturation. Although the αββα and ββαββ designs were only weakly stable, the second-generation βαββ design EHEE_rd2_0005 (TTRYRFTDEEEARRAAKEWARRGYQVHVTQNGTYWEVEVR; SEQ ID NO:35) is, to our knowledge, the most thermostable minimal protein ever found (lacking disulfides or metal coordination): its CD spectrum is essentially unchanged at 95° C., and its Cm is above 5 M GuHCl.

[0057] The amount of buried NPSA was the strongest observed determinant of folding stability for second-generation Poop designs, and continued to show correlation with stability for second-generation aa designs. The success rate for ααα designs improved in Round 2 at all levels of buried NPSA, indicating that improving design properties unrelated to buried NPSA (mainly local sequence-structure compatibility) contributed to the increase in success rate along with the increase in NPSA. To improve the stability of the other two topologies, we built a third generation of designs with even greater buried NPSA, at the cost of increased exposure of hydrophobic surface that could hurt solubility. To increase buried NPSA in the ββαββ topology, we expanded the architecture from 41 to 43 residues. This led to a large increase in the ββαββ success rate (˜0% to 13%) and 236 newly discovered stable ββαββ designs. We purified four third-generation designs and found the ββαββ design EEHEE_rd3_1049 (TTVKGDIKVTFDNPEKAKKYAQKLAKIYQLTVHVHGDTIHVK; SEQ ID NO:199) to be very stable (FIG. 2). We solved the solution structure of this design by NMR, revealing that it folds into its designed structure, which is not found in nature at this size range (FIG. 2). Buried NPSA remained the dominant determinant of stability within the tested ββαββ designs. We also observed that a newly improved Rosetta energy function (optimized independently from this work (19) provided significant discrimination between stable and unstable designs, both for the ββαββ topology and for other topologies.

[0058] Having accumulated nearly 1,000 examples of stable designs from rounds 1-3, we asked whether more systematic application of this data could be used to select better designs. We designed 2,000-6,000 new proteins per topology (using the improved energy function), and then selected 1,000 designs each for experimental testing by ranking the designs using linear regression, logistic regression, and gradient boosting regression models trained on the structural features and experimental stabilities of the 10,000 designs from Rounds 1-3. Many designs selected for testing were predicted to have a low likelihood of folding, but were included to increase the sequence diversity of tested designs and because better designs could not be found (see Methods: Protein design). Despite this, an even larger fraction of these designs proved stable than before: most notably, the success rate for βαββ designs increased from 17% to 39%, and the success rate for ββαββ designs increased from 13% to 58%. Although the success rate for designing the αββα topology remained low, five purified fourth-generation designs in this topology possessed the highest stability yet observed for the fold by CD. We solved the structure of one of these (HEEH_rd4_0097) (DVEEQIRRLEEVLKKNQPVTWNGiTYTDPNEIKKVIEELRKSM; SEQ ID NO:3222) by NMR and found that it adopts its designed structure in solution (FIG. 2A). Of the models used to rank designs, the logistic regression was most successful, and was very accurate: when designs are binned according to their predicted success probability, the number of success in each bin is very close to that predicted beforehand by the logistic regression. The accuracy of the regression model demonstrates that large-scale analysis of stable and unstable designed proteins can be used to build predictive models of protein stability. The overall increase in success across the four rounds—from 200 stable designs in Round 1 (nearly all in a single topology) to over 1,800 stable designs in Round 4 spread across all four topologies—also demonstrates the power of our massively parallel approach to drive systematic improvement in protein design.

### Sequence Determinants of Stability

[0059] We next examined determinants of stability at the individual residue level by constructing a library containing every possible point mutant of 14 designs, as well as every point mutant in three paradigm proteins from decades of folding research: villin HP35, pin1 WW-domain, and hYAP65 WW-domain L30K mutant. This library of 12,834 point mutants is comparable in size to the 12,561 single mutants found in the entire ProTherm™ database (34) and is unbiased toward specific mutations. We assayed this library for stability using trypsin and chymotrypsin, and determined an overall stability effect for each mutation by using the independent results from each protease to maximize the dynamic range of the assay (see Methods: Mutational stability effects). The mutational effects were qualitatively consistent with the designed structures for 13 of 14 designs. As expected, the positions on the designs that were most sensitive to mutation were the core hydrophobic residues, including many alanine residues, which indicates the designed cores are tightly packed. Mutations to surface residues had much smaller effects, highlighting the potential of these proteins as stable scaffolds whose surfaces can be engineered for diverse applications.

[0060] To examine the mutability of protein surfaces in greater detail and to probe more subtle contributions to stability, we divided 260 surface positions from 12 of the designs into categories based on secondary structure, and calculated the average stability effect of each amino acid for each category using the ˜5,000 stability measurements at these positions (Methods: Mutational stability effects). We observed specific, though weak, preferences for helices, helix N-caps, the first and last turns of helices, middle strands and edge strands, and linker residues). Amino acids that were favorable for capping helices (Asp, Ser, Thr, and Asn) were unfavorable within helices; these amino acids (except Asn) were as destabilizing as glycine when inside helices. Hydrophobic side chains were stabilizing even when located on the solvent-facing side of a β-sheet, and this effect was stronger at middle strand positions compared with edge strand positions. Most notably, we observed stabilization from charged amino acids on the first and last turns of α-helices when these charges counteract the C-to-N negative-to-positive helical dipole; charges that enhanced the dipole were destabilizing. We isolated this effect by comparing the average stability of each amino acid on first and last helical turns with the average stability of each amino acid at all helical sites (polar sites only in both cases). This effect remained significant in our data even when we restricted the analysis to positions that were Arg or Lys in the original designs to control for any bias in the designed structures favoring original, designed residues compared with mutant residues, although no significant effect was seen for mutations at Glu positions. We had not examined agreement with this dipolar preference during the four rounds of design, and after this observation, we found that the net favorable charge on first and last helical turns (stabilizing charges minus destabilizing charges summed over all helices) discriminated between stable and unstable fourth-generation ααα designs better than any other metric we examined, explaining in part why the success rate had not reached 100%.

[0061] In the three naturally occurring proteins, mutations at conserved positions were generally destabilizing, although each natural protein possessed several highly conserved positions that we experimentally determined to be unimportant or deleterious to stability. In villin HP35, these were W64, K70, L75, and F76 (villin HP35 consists of residues 42-76), which are required for villin to bind F-actin. In pint, the highly conserved S16 is deleterious for stability, but directly contacts the phosphate on phosphopeptide ligands of pint (38), highlighting a stability-function trade-off in pin1 discoverable without directly assaying function, the conserved residues H32, T37, and W39 are relatively unimportant for stability, but these residues form the peptide recognition pocket in YAP-family WW-domains. These examples illustrate how our approach enables high-throughput identification of functional residues, even without a functional assay or a protein structure, via comparison between stability data and residue conservation.

### Stability Measurement of all Known Small Protein Domains

[0062] How stable are these designed proteins compared with naturally occurring proteins? To examine this, we synthesized DNA encoding (1) all 472 sequences in the protein databank (PDB) between 20 and 50 residues in length and containing only the 19 non-Cys amino acids, and (2) one representative for all 706 domains meeting these criteria in the Pfam protein family database. We included this DNA (and DNA for all stable designs from rounds 1-3) in the library containing our fourth-generation designs to facilitate a head-to-head comparison. Many of the PDB structures are multimeric, and the most resistant overall sequence (measured by stability score) was a C-terminal coiled-coil domain from a TRP channel (3SRO, stability score 1.93). Of the 100 unique, monomeric sequences with PDB structures, the most protease-resistant was a peripheral subunit binding domain (ααα topology) from the thermophile Bacillus stearothermophilus (2PDD, stability score 1.48), which has been heavily studied as an ultrafast-folding protein. A total of 774 designed proteins had higher stability scores than this most protease-resistant natural monomeric protein. The number of stable proteins discovered is orders of magnitude greater than that of natural proteins in the PDB (monomeric or not) in this size range.

### Conclusion

[0063] We have shown that proteins can be computationally designed and assayed for folding thousands at a time, and that high-throughput design experiments can provide quantitative insights into the determinants of protein stability. Large libraries can be designed in a relatively unbiased manner (as in our first generation) to maximize the protein property space examined, or properties can be tuned to increase the design success rate at the cost of diversity. The power of our iterative learning approach to progressively hone in on more subtle contributions to stability is highlighted by the progression of our ααα design sets from early rounds in which design failures were caused by insufficient buried nonpolar surface area to the last round where helix-sidechain electrostatics had the greater effect. The large numbers of folded and not folded designs will also provide stringent tests of molecular dynamics simulation approaches which have successfully reproduced structures and some thermodynamic measurements of natural proteins, but have not yet been challenged with plausible but unstable protein structures like our design failures.

[0064] The four solution structures, saturation mutagenesis data on 13 of 14 designs, and over thirty thousand negative control experiments indicate that the large majority of our stable sequences are structured as designed. These thousands of designed proteins, stable without disulfides or metal coordination, should have numerous applications in biotechnology and synthetic biology. Many are more stable than any comparably-sized monomeric proteins found in the PDB, making them ideal scaffolds for engineering inhibitors of intracellular protein-protein interactions. Their small size may also help promote membrane translocation and endosomal escape. As DNA synthesis technology continues to improve, high-throughput protein design will become possible for larger proteins as well, revealing determinants of protein stability in more complex structures and leading to a new era of iterative, data-driven de novo protein design and modeling.

### Methods

### Protein Design

[0065] All protein design in this work was performed in three stages: (1) backbone construction, (2) sequence design, and (3) selection of designs for testing. Backbone construction (the de novo creation of a compact, three-dimensional backbone with a pre-specified secondary structure) was performed using a blueprint-based approach described previously (34, 34). Briefly, blueprint files were built by hand for each topology in order to define (a) the secondary structure at each residue position for that topology, and (b) the strand pairing and register of any β-sheets. These blueprint files were then used to select short three-dimensional fragments from protein crystal structures matching the proposed secondary structure in the blueprint (200 fragments for every 3- and 9-residues-length stretch of the blueprint). Finally, these fragments were assembled into a full protein backbone using Monte Carlo sampling with a coarse-grained energy function (including constraints on the hydrogen-bonding pairs of residues as specified for the β-sheets in the blueprint) until the overall backbone matched the specified secondary structure and topology, satisfied compactness criteria, and avoided steric clashes. The same four HHH blueprints (each 43 residues in length) were used for all four design rounds. One 40-residue-length EHEE blueprint was used for all four design rounds. A total of 42, 12, 27, and 7 HEEH blueprints (each 43 residues in length) were used in design rounds 1-4 respectively. Blueprints for each round were selected based on the stabilities of designs from the prior round; new blueprints were also introduced in design rounds 2 and 3. A total of 2, 1, 4, and 7 EEHEE blueprints were used in design rounds 1-4 respectively. New blueprints were introduced in design round 3 that increased the protein length from 41 residues to 42 or 43 residues in order to increase the size of the potential hydrophobic core and increase the helix length (blueprints for design rounds 1-4 were 41, 41, 41/42/43, and 43 residues long respectively).

[0066] Each backbone structure produced above was used as the input to the Rosetta™ sequence design protocol FastDesign™, also described previously (33). This protocol alternates between (a) a fixed-backbone Monte Carlo search in sequence and rotamer space, and (b) a fixed-sequence backbone relaxation step. This protocol begins with a softened repulsive potential and restores this potential to full strength across several cycles of design and relaxation. These design steps employ the Rosetta full-atom energy function. Design rounds and 1 and 2 employed the Talaris™2013 version of the energy function (40): design round 3 employed the beta_july15 version of the energy function, and design round 4 employed the beta_nov15 version of the energy function (19, 55). The allowed amino acids at each position were restricted using the LayerDesign™ protocol (34); these restrictions are imposed separately from the design energy function for more efficient sampling and to account for design criteria not reflected in the energy function, such as solubility. In this protocol, positions on the designed structure are classified into “core”, “boundary”, and “surface” layers according to their degree of burial, and polar amino acids are excluded from positions in the core layer while nonpolar amino acids are excluded from positions in the surface layer. Layer classification was performed using the “sidechain neighbors” protocol, which counts the number of neighboring residues in the region around the side chain of a given residue. Layer classification is performed on each structure individually and can change during the design process as the structure changes. The definitions of each layer (e.g. the level of burial required for a residue to be classified as core or boundary) were adjusted from design round to design round in order to increase the number of positions where hydrophobic amino acids were permitted. The specific layer definitions used at each stage are given in the included design scripts. For finer control over hydrophobic and polar positioning for the Round 4 designs, we manually specified the allowed amino acids at each position in the designed topologies using resfiles. Starting from design round 3, we included an amino acid composition-based energy term in the design energy function that penalized sequences possessing too few nonpolar amino acids. Finally, to limit the number of designs analyzed at the final selection stage, designs were filtered following sequence design using several basic criteria (primarily compactness and overall score).

[0067] After designing 2,000-40,000 finished designs per topology, we then analyzed and ranked these across diverse structural metrics inside and outside of Rosetta™ in order to select the final set of designs for experimental testing. In design rounds 1-3, this ranking was performed by selecting metrics of interest and assigning weights to each metric (again by hand) in order to produce a single composite design score, which was the sum of each metric multiplied by its weight. The selected metrics and their weights were adjusted until the top-ranking designs appeared optimal to the designer. Only a small number of metrics were used in design round 1 in order to ensure broad sampling of protein properties; additional metrics were added in further design cycles as new causes of failure were identified. Different weights were used for each different topology. All scoring metrics used are defined in the section Methods: Definition of scoring metrics.

[0068] The metrics used for ranking designs in Round 1 evaluated each design's overall energy (total_score), β-sheet quality (hbondr_lr_bb_per_res), packing (cavity volume, degree, holes, AlaCount, pack), hydrophobic burial (buried_np, one_core_each, two_core_each, percent_core_SCN), agreement between sequence and local structure (mismatch_probability), solubility (exposed_hydrophobics), and hydrogen bond satisfaction (unsat_hbond). Based on the metrics that correlated with design success in Round 1 (as described in the text), we adjusted these weights to select new designs for Round 2, and also added additional metrics related to nonpolar burial (buried_minus_exposed, buried_over_exposed, contact_all) and the geometric similarity between 9-residue-long fragments of the designs and fragments of natural proteins of similar local sequence (avg_best_frag, worst6frags, worstfrag). We again adjusted these weights to select designs for Round 3, and added additional measures of local sequence-structure compatibility (abego_res_profile, p_aa_pp), fragment quality (avg_all_frags), packing (fa_atr_per_res, ss_sc), nonpolar burial (n_hphob_clusters, largest_hphob_cluster, hphob_sc_contacts), the spacing between nonpolar amino acids along the primary sequence (contig_not_hp_avg, contig_not_hp_max), and solubility (fxn_exposed_is_np). In design round 3, we also introduced restrictions on the sequence similarity of the selected βαββ designs (this topology featured the lowest amount of sequence variation between designs): rather than selecting the highest-ranking designs for testing, we selected designs in rank order while passing over designs that were more than 60% identical to a higher-ranking design already selected for testing.

[0069] For design round 4, we employed an automated design ranking scheme. All designs from all rounds were scored with ˜50 structural metrics, and the structural metrics and experimental stability scores of the Round 1-3 designs were used to fit topology-specific linear regression, logistic regression, and gradient boosting regressions to predict experimental outcome (stability score) as a function of the design structural metrics. Models were fit using the scikit.learn package (56). Logistic regressions employed Li-regularization with C=0.1. Gradient boosting regressions employed 250 estimators with a tree depth of 5, the minimum samples per split set to 5, a learning rate of 0.01, and a least-squares loss function. All potential Round 4 designs were then ranked according to their predicted stabilities (linear and gradient boosting regression) or success probabilities (logistic regression), and designs were selected for testing in order of the lowest rank given to each design by any of the three regression models. In selecting designs for testing, we again passed over designs that were too similar to designs already selected for testing. We used a threshold of 70% identity for ααα and βαββ designs, and a threshold of 75% ββαββ designs (this was unnecessary for αββα designs). The median identity between designs sharing a topology remained 20-50%.

### DNA Synthesis

[0070] All sequences were reverse translated and codon optimized using DNAworks2.0 (57). Sequences were optimized using E. coli codon frequencies despite being used for expression in yeast. Oligo libraries encoding designs and control sequences for design rounds 1 and 2 (12,472 sequences per round) were purchased from CustomArray™, Inc. The oligo library for design round 3 (12,524 sequences) was purchased from Twist Bioscience. Oligo libraries for the point mutant library (13,564 sequences) and design round 4 (18,527 sequences, including the natural protein sequences) were ordered from Agilent Technologies in 27,000 feature format and selectively amplified out of the 27,000-sequence pool in the initial qPCR step. In order to amplify all sequences in a library as evenly as possible, we padded all sequences with extra residues until the amplified region of every oligo had the same length. All libraries were 43 residues in length (not including 18 bp adapter sequences on both ends), except design round 4 where all sequences were 50 residues in length. The saturation mutagenesis library also included 46-residue length oligos for the hYAP65 sequences. In the 43-residue libraries, the shorter EHEE and EEHEE sequences were padded with GSS or GS at the N-terminus. In design library 4, EHEE and EEHEE designed sequenced were again padded at the N-terminus with GSS or GS to reach 43 residues, and then all sequences were padded with N, G, and S residues at the C-terminus so that all sequences would be a uniform 50 residues in length.

### DNA Preparation and Sequencing

[0071] Oligo libraries were amplified for yeast transformation in two qPCR steps. First, a 10 ng (CustomArray™ libraries) or 2.5 ng (Twist and Agilent libraries) quantity of synthetic DNA was amplified in a 25 μL reaction using Kapa HiFi™ Polymerase (Kapa Biosystems) for 10-20 cycles by qPCR. The number of cycles was chosen based on a test qPCR run in order to terminate the reaction at 50% maximum yield and avoid overamplification. Second, this reaction product was gel extracted to isolate the expected length product, and re-amplified by qPCR as before to generate sufficient DNA for high-efficiency yeast transformation. Each second qPCR reaction used 1/25^{th} of the gel extraction product as template. This second PCR product was PCR purified and concentrated for transformation of EBY100 yeast using the protocol of (58)(3 μg of insert and 1.5 μg of cut vector per transformation). Yeast display employed a modified version of the pETcon™ vector (59) (known as “pETcon 3”), altered to remove a long single-nucleotide stretch near the cloning region. The amplified libraries included 40 bp segments on either end to enable homologous recombination with the pETcon vector. Gel extraction and PCR purification were performed using QIAquick™ kits (Qiagen Inc).

[0072] DNA libraries for deep sequencing were prepared as above, except the first step started from yeast plasmid prepared from 5×10⁷ to 1×10⁸ cells by Zymoprep™ (Zymo Research). Cells were frozen at −80° C. before and after the zymolase digestion step to promote efficient lysis. One-half the plasmid yield from the Zymoprep™ was used as the template for the first PCR amplification. Illumina adapters and 6-bp pool-specific barcodes were added in the second qPCR step. Unlike libraries prepared for transformation, DNA prepared for deep sequencing was gel extracted following the second amplification step. All libraries before and after selections were sequenced using Illumina NextSeq™ sequencing.

### Yeast Display Proteolysis

[0073] S. cerevisiae (strain EBY100) cultures were grown and induced as in (26). Following induction, cell density (O.D.₆₀₀) was measured by NanoDrop™, and an amount of cells corresponding to 1 mL at O.D. 1 (12-15M cells) was added to each microcentrifuge tube for proteolysis. Cells were washed and resuspended in 250 μL buffer (20 mM NaPi 150 mM NaCl pH 7.4 (PBS) for trypsin reactions, or 20 mM Tris 100 mM NaCl pH 8.0 (TBS) for chymotrypsin reactions). Proteolysis was initiated by adding 250 μL of room temperature protease in buffer (PBS or TBS) followed by vortexing and incubating the reaction at room temperature (proteolysis reactions took place at cell O.D. 2). After 5 minutes, the reaction was quenched by adding 1 mL of chilled buffer containing 1% BSA (referred to as PBSF or TBSF), and cells were immediately washed 4× in chilled PBSF or TBSF. Cells were then labeled with anti-c-Myc-FITC for 10 minutes, washed twice with chilled PBSF, and then sorted using a Sony SH800 flow cytometer using “Ultra Purity” settings. Events were initially gated by forward scattering area and back scattering area to collect the main yeast population, and then by forward scattering width and forward scattering height to separate individual and dividing cells (which were used for analysis) from cell clumps (which were discarded). Following these gates, cells were gated by fluorescence intensity in one-dimension (FIG. 1B), with the threshold separating displaying (fluorescent) from non-displaying (non-fluorescent) cells set at ˜2,200 fluorescence units (FIG. 1B). Small adjustments were made to this gate based on daily conditions to maximize the separation between the major displaying and non-displaying populations. For each sort, we recorded the fraction of cells passing the fluorescence threshold before proteolysis (using cells from the same starting yeast population, but untreated with protease) and after proteolysis, and also recorded the total number of cells collected for each condition.

[0074] Design libraries 1-4 were assayed at six protease concentrations over three sequential selection rounds. Trypsin assays used 0.07 μM, 0.21 μM, 0.64 μM, 1.93 μM, 5.78 μM, and 17.33 μM protease; chymotrypsin assays used 0.08 μM, 0.25 μM, 0.74 μM, 2.22 μM, 6.67 μM, and 20.00 μM protease. Selections using the lowest two concentrations of each protease (0.07 μM and 0.21 μM trypsin and 0.08 μM and 0.25 μM chymotrypsin) were performed starting from the naïve yeast library. The middle two selections (0.64 μM and 1.93 μM trypsin and 0.74 μM and 2.22 μM chymotrypsin) were performed starting from the post-selection 0.21 μM trypsin or 0.25 μM chymotrypsin cultures after 12-24 hours of growth and 12-24 hours of fresh induction. The highest concentration selections were performed starting from the post-selection 1.93 μM trypsin or 2.22 μM chymotrypsin cultures again following growth and re-induction.

[0075] The saturation mutagenesis library was assayed at six (trypsin) or eight (chymotrypsin) protease concentrations over four sequential selection rounds. Trypsin assays used 0.41 M, 0.81 μM, 1.63 μM, 3.25 μM, 6.50 μM, and 13.00 μM protease; chymotrypsin assays used 0.21 μM, 0.42 μM, 0.84 μM, 1.69 μM, 3.38 μM, 6.75 μM, 13.50 μM, and 27.00 μM protease. As before, selections 1 and 2 were performed starting from the naïve library, selections 3 and 4 were performed starting from the selection 2 culture following growth and re-induction, selections 5 and 6 were performed starting from the selection 4 culture following growth and re-induction, and selections 7 and 8 (only done for chymotrypsin) were performed starting from the selection 6 culture following growth and re-induction. For trypsin, selection 6 was performed starting from the selection 5 culture following growth and re-induction.

### Protease Reagents

[0076] Trypsin-EDTA (0.25%) solution was purchased from Life Technologies and stored at stock concentration (2.5 mg/mL) at −20° C. α-Chymotrypsin from bovine pancreas was purchased from Sigma-Aldrich as lyophilized powder and stored at 1 mg/mL in TBS+100 mM CaCl₂ at −20° C. Each reaction used a freshly thawed aliquot of protease. The trypsin stock activity was measured to be 5,410±312 BAEE units (ΔA₂₅₃×1,000/l minute) per mg in PBS buffer, pH 7.4, with 0.23 mM BAEE (Sigma-Aldrich). Using the Pierce Fluorescent Protease Assay Kit with the fluorescence protocol (ThermoFisher Scientific), 1 mg of the chymotrypsin stock was measured to have equivalent activity to 3.74*0.31 mg of the trypsin stock in pH 7.4 PBS buffer at 25° C.

### Processing of Raw Deep Sequencing Data

[0077] Each library in a sequencing run was identified via a unique 6 bp barcode. Following sequencing, reads were paired using the PEAR™ program (60). Reads were considered counts for a particular ordered sequence if the read (1) contained the complete NdeI cut site sequence immediately upstream from the ordered sequence, (2) contained the complete XhoI cut site sequence immediately downstream from the ordered sequence, and (3) matched the ordered sequence at the amino acid level (for sequences in designed libraries 1-4) or at the nucleotide level (sequences in the saturation mutagenesis library). A higher stringency was used for the saturation mutagenesis library due to the overall similarity of the sequences in the library.

EC₅₀ Estimation from Sequencing Counts

[0078] To determine protease resistance from our raw sequencing data we built a probabilistic model of the cleavage and selection procedure and used this model to calculate maximum a posteriori estimates of the protease EC₅₀ of each member of the pool. To build the model, we assumed that proteolysis (i.e. any cleavage that results in detachment of the epitope tag) follows pseudo-first order kinetics, with a rate constant specific to each sequence. The fraction of surviving, tagged surface proteins for a given sequence after proteolysis is therefore:

fₛₚᵣₒₜ=e^{-k}^{ₚ}^{[E]t} (1)

where kₚ is a sequence-specific rate constant, [E] is the concentration of protease and t is the reaction time.

[0079] In the assay, each cell has a labeling intensity proportional to the number of displayed proteins on its surface. Within the expressing population of cells, we assumed that the number of displayed proteins per cell is log-normally distributed, resulting a distribution of labeling intensities L_{cell} ∝ ln N(μ, σ²) with sequence-independent expression location and scale parameters β and σ. The fraction of cells collected at the labeling threshold L_{cell}>Lₛ is then given by the cumulative distribution function:

$$\begin{matrix}{Frac}_{sel} = 1 - {CDF}_{lognormal} ( {L}_{s} , μ , σ ) & ( 2 ) \\ = \frac{1}{2} - \frac{1}{2} erf [ \frac{ln {L}_{s} - μ}{\sqrt{2} σ} ] & ( 3 )\end{matrix}$$

[0080] Following proteolysis, labeling intensity is given by Lₚₒₛₜ=L_{cell}*fₛₚᵣₒₜ and cells are collected when Lₚₒₛₜ>Lₛ. With a fixed selection level Lₛ (defined as e^{c}^{ₛ} in terms of log-intensity rather than absolute intensity) across selection rounds, the fraction of cells collected after proteolysis in each round is given by:

$$\begin{matrix}{Frac}_{sel} = 1 - {CDF}_{lognormal} ( \frac{{L}_{s}}{{f}_{sprot}} , μ , σ ) & ( 4 ) \\ = \frac{1}{2} - \frac{1}{2} erf [ \frac{ln \frac{{L}_{s}}{{f}_{sprot}} - μ}{\sqrt{2} σ} ] \vert {L}_{s} = {e}^{{c}_{s}} & ( 5 ) \\ = \frac{1}{2} - \frac{1}{2} erf [ \frac{{c}_{s} + {k}_{p} [ E ] t - μ}{\sqrt{2} σ} ] & ( 6 )\end{matrix}$$

[0081] For model fitting it is advantageous to describe protease stability in terms of a sequence-dependent variable EC₅₀ and a sequence-independent variable Kₛₑₗ. The EC₃₀ for each sequence is defined as the protease concentration at which half of all cells displaying that sequence pass selection. Kₛₑₗ is a constant term representing expression and collection conditions. Setting Fracₛₑₗ=½ allows us to define kₚt in terms of the sequence-specific EC₅₀:

$${k}_{p} t = \frac{μ - {c}_{s}}{{EC}_{50}} \qquad ( 7 )$$

[0082] Substituting (7) into (6) and grouping the sequence-independent terms β, σ, and cₛ into Kₛₑₗ yields the form of the model used for fitting:

Frac_{sel}& {\frac{1}{2}}−{\frac{1}{2}}\,\mathrm{erf}{\Big[}{\frac

{c_s+[E]\frac{\mu−c_s}{EC_{50}}−\mu}{{sqrt{2}}\sigma}}{\Big]}\\ (8)

&={\frac{1}{2}}−{\frac{1}{2}}\,\mathrm{erf}{\Big[}{\frac(\mu−

c_s}{\sqrt{2}\sigma}}\left(\frac{[E]}{EC_{50}}−1\right){\Big]}\Big

|K_{sel}=\frac{\mu−c_s}{\sqrt{2}\sigma}\\ (9)

Frac_{sel}(EC_{50},K_{sel},[E])&={\frac{1}{2}}−{\frac

{1}{2}\,\mathrm

{erf}{\Big[}{K_{sel}}\left(\frac{[E]}{EC_{50}}−1\right){\Big]}

\end{aligned}$$ (10)

[0083] We modeled each selection experiment as a set of discrete selection events producing both (A) a difference in the observed library population distribution after selection, and (B) a global selection rate during the sorting experiment. For each round of selection with enzyme concentration [E]_{round}, an observed input population distribution Pₘ is updated by a sequence-dependent proteolysis rate to produce an unobserved distribution of labeled cells P_{cleave}:

$&\begin{aligned)}

P_{cleave,i}=\frac{P_{in,i}\times Frac_{sel,i}(EC_{50,i},K_{sel},[

E]_{round})}{\sum{j}\hat{ }{ }

{P_{in,j}\times Frac_{sel,j}(EC_{50,j},K_{sel},[E]_{round})}}

\end{aligned}$$ (11)

for all sequences i, where the denominator of (11) normalizes P_{cleave} so that ΣP_{cleave}=1.

[0084] In each selection, n_{assay} total cells are examined, of which the cells nₛₑₗ passing the labeling threshold are collected. The nₛₑₗ collected cells are randomly selected from P_{cleave} during sorting to produce the observed post-selection distribution Pₛₑₗ. To account for carryover during sorting, contamination during library preparation, and sequencing errors that can cause a sequence i to appear in the selected population even when Frac_{sel,i}≈0, we set a lower bound on Fracₛₑₗ equal to 10⁻⁴.

[0085] Each library was analyzed by multiple rounds of selection, where the resulting population of a round may be used as the source population for a subsequent selection round at a higher protease concentration (see Methods: Yeast display proteolysis for details). For each round, the observed distribution of matching reads in the pre-selection library is used as Pᵢₙ, which is normalized to sum to 1. The (non-normalized) post-selection distribution Pₛₑₗ (which sums to the total number of cells collected nₛₑₗ) is computed by multiplying nₛₑₗ by the observed normalized distribution of matching reads in the post-selection library. These definitions of Pᵢₙ and Pₛₑₗ assume that there are no sequence-dependent effects in amplification efficiency or sequencing efficiency. If a sequence did not appear in the input distribution Pᵢₙ, any observations of that sequence in the selected population Pₛₑₗ were ignored.

[0086] Because the model only considers sequences that match those in the designed library (i.e. only library sequences are included in Pᵢₙ and Pₛₑₗ), the number of cells collected for nₛₑₗ is smaller than the total number of cells collected as reported by the flow cytometer. To account for this, we crudely approximated nₛₑₗ as the number of cells collected by the flow cytometer multiplied by the fraction of sequencing reads that matched sequences in the designed library (i.e. if 200,000 cells were collected in a sort and 75% of sequencing reads for that sort matched library sequences, we assumed in the model that 150,000 cells containing library sequences had been collected). In rare cases where the total number of matching sequencing reads for a given library was smaller than the estimated nₛₑₗ (thus the statistical error was limited by sequencing rather than sorting), the number of matching sequencing reads was used as nₛₑₗ. Finally, to calculate the total number of cells observed (containing library sequences) n_{assay}, we assumed that the overall collection rate (i.e. one collected cell for every twenty observed cells) could be used as a proxy measure of the collection rate for library sequences (as would be true if library sequences dominated the overall cell population, or if the collection rates for library and non-library cells were approximately equal). We calculated the overall collection rate directly from the flow cytometry data as the fraction of initially displaying cells that remained displaying following proteolysis, and then calculated n_{assay} by dividing nₛₑₗ by the overall collection rate.

[0087] The complete model log-likelihood is the sum of the data-log likelihoods of Pₛₑₗ and nₛₑₗ and prior likelihoods over the fit parameter EC₅₀, taking Pᵢₙ and n_{assay} as given. Kₛₑₗ was initially treated as a fit parameter as well, but for consistency between all libraries, we fixed Kₛₑₗ at 0.8 for all analysis in this work. The log-likelihood of the observed population Pₛₑₗ was modeled as a multinomial distribution of nₛₑₗ independent selections from P_{cleave}:

Mn(Pₛₑₗ|nₛₑₗ,P_{cleave}) (12)

[0088] The log-likelihood of the observed global selection rate was modeled as a binomial distribution of selection events, where the selection probability is the weighted mean of sequence-dependent proteolysis rates:

$$Bn ( {n}_{sel} \vert {n}_{assay} , {Frac}_{sel , pop} ) \vert {Frac}_{sel , pop} = {\sum }_{i} {Frac}_{sel , i} {P}_{in , i} \qquad ( 13 )$$

for all sequences i. Uniform priors covering the range of experimentally relevant values were used for the model parameters. The MAP estimate of the model parameters is found by optimizing the expression:

$${argmax}_{{EC}_{50}} {\sum }_{r ∈ round} {Mn}_{r} + {B}_{{n}_{r}} \qquad ( 14 )$$

[0089] The 95% credible intervals for all EC₅₀s were also estimated from the likelihood expression given in (14). All model components were implemented in Python via PyMC3™ (61) and Theano™ (62).

[0090] For the analysis of design success rates and design features correlating with success, we excluded sequences whose model-estimated EC₅₀ credible intervals were large. To include as much data as possible, we used a permissive threshold: designs were included in the analysis if their chymotrypsin and trypsin stability score 95% credible intervals (directly taken from the BCs credible intervals) were smaller than 0.95 stability score units (A factor of 9 in [protease]; the equivalent of two rounds of sorting). These thresholds excluded from analysis 14%, 30%, 0.7%, and 1% of sequences from design rounds 1-4 respectively. Credible intervals were much narrower in the later rounds due to improved DNA libraries and better representation of each design in sorting. Despite the permissive thresholds, the median 95% credible interval width for stability scores for sequences included in the analysis was 0.14 stability score units, and 95% of the credible intervals were smaller than 0.48 stability score units.

### Unfolded State Model

[0091] We trained a model for the expected protease EC₅₀ of an unfolded protein using our stability data on scrambled sequences. We used both fully scrambled sequences and hydrophobic-polar pattern-preserving scrambled sequences as training data (˜18,000 sequences in total). Only sequences with EC₅₀ value 95% credible intervals smaller than a factor of 3 in [protease] were used for model fitting (protease concentrations increased by this amount at each selection step).

[0092] To define the model, we separated the cutting rate into a fixed rate for the constant regions of the fusion construct and an individual rate of cutting at each site i in the inserted sequence. This was done by rearranging equation (7):

$${EC}_{50} = \frac{μ - c}{{k}_{f} t + {\sum }_{i = 1}^{n} {k}_{i} t} \qquad ( 15 )$$

where k_{f} is the pseudo-first order rate constant for the constant regions of the fusion construct in M_{enzyme}⁻¹ s⁻¹, kᵢ is the cleavage rate after amino acid i for all n residues in the inserted sequence (same units), and t is time. If we assume that (1) the inserted sequence cannot affect the cleavage rate of the constant sequence, and (2) that the inserted sequence is completely uncleaved (all kᵢ=0), then the EC₅₀ reaches a maximum that is independent of the inserted sequence:

$${EC}_{50 max} = \frac{μ - c}{{k}_{f} t} \qquad ( 16 )$$

By dividing the numerator and denominator on the right-hand-side of (15) by k_{f}t, we can re-write (15) as:

$${EC}_{50} = \frac{{EC}_{50 max}}{1 + {\sum }_{i = 1}^{n} \frac{{k}_{i}}{{k}_{f}}} \qquad ( 17 )$$

We modeled kᵢ/k_{f} as a function of the 9-residue-long local sequence surrounding sequence position i. In other words, the cut rate at site i in the model depends on the amino acid identities at sites i−4 through i+4, referred to as sites P5 to P4′ in protease nomenclature. The effects of the sequence at these positions are implemented through a position-specific scoring matrix (PSSM) with coefficients for all 19 amino acids (excluding cysteine) at positions P5-P4′ around a potential cut site. The model for kᵢ/k_{f} as a function of the local sequence is given below:

$$\frac{{k}_{i}}{{k}_{f}} = \frac{{k}_{max}}{1 + exp ( {c}_{0} - {\sum }_{site = P 5}^{P 4} PSSM ( {aa}_{site} , site ) )} \qquad ( 18 )$$

where aaₛᵢₜₑ is the amino acid identity at site. The parameters of the full model are EC₅₀ₘₐₓ, kₘₐₓ, c₀, and the 19×9=171 elements of the PSSM. Distributing the c₀ term into the PSSM coefficients would not affect the model (c₀ adds no additional model freedom), but including the term aided model fitting. Positive PSSM coefficients lead to a smaller denominator in eqn. (18), an increased cutting rate kᵢ, and a lower predicted EC₅₀ by eqn. (17). The model parameters (referred to collectively as θ) were trained by minimizing the logarithmic error between the model predicted EC₅₀s and the observed EC₅₀s over the training set of scrambled sequences. We used a combination of squared-error and absolute error in the objective function to provide slightly more tolerance for large outliers than squared-error alone.

$$\text{?} \text{?} {( log ( \text{?} ) - log ( \text{?} ( seq , \text{?} ) ) )}^{2} + 0.25 \times abs ( log ( \text{?} ) - log ( \text{?} ( seq , \text{?} ) ) ) \\ \text{?} \text{indicates text missing or illegible when filed} \qquad ( 19 )$$

[0093] We trained the model starting from a uniform PSSM by iterating between fitting only the P1 component of the PSSM, all other positions of the PSSM, and the EC_{50,MAX}, kₘₐₓ, and c₀ terms. We validated the model using three-fold cross validation (three separate models built by excluding a different one-third of the data at a time, followed by predicting each EC₅₀ using the model that did not encounter that sequence during training). The cross-validated root-mean-squared errors (RMSE) for trypsin and chymotrypsin are 2% (trypsin) and 5% (chymotrypsin) higher than the RMSEs of the models trained using all data without cross-validation, indicating minimal overfitting. The predictions made by the cross-validated models are very similar to the predictions made by the models trained on the complete dataset.

[0094] All stability scores reported herein were calculated using the final version of the unfolded state model, trained using the scrambled sequence data from all four design rounds. Obviously, data on the full set of scrambled sequences was not available at earlier stages of the work. The data analysis after each design round employed earlier versions of the unfolded state model that were trained using the scrambled sequence data that had been collected up to that point. However, the final model predictions used for the manuscript are very similar to the model predictions made when only the data from Round 1 are used for training.

[0095] Because the unfolded state model is trained on EC₅₀s of scrambled sequences and not on designed sequences, a systematic bias may be introduced that would cause scrambled sequences to receive lower stability scores than designed sequences (the stability score is the deviation of each sequence's measured EC₅₀ from the unfolded state model's predicted EC₅₀; if the model were overfit, the sequences used in training would have incorrectly low deviations). However, the cross-validation results indicate that only minimal overfitting is present in the model parameters. To further quantify possible bias in the model parameters, we examined the distribution of predicted unfolded state EC₅₀ values for scrambled sequences (which were used in training) and designed sequences (which were not). We would expect these distributions to be the same because the designed and scrambled sequences are very similar at the sequence level. However, on average, the predicted unfolded state EC₅₀ values for the scrambled sequences are higher than the predicted EC₅ values for the designed sequences, which biases the scrambled sequences to appear less stable, although this effect is small. This bias likely results from overfitting of EC₅₀ values for partially folded scrambled sequences. Overall, the small bias (0.15-0.16 units of stability score on average) between designed sequences and scrambled sequences does not change the conclusion that hundreds of the designs at each stage are many times more stable than the scrambled sequences, often by 0.5-1.0 stability score units or more.

### Protein Expression and Purification

[0096] Two different expression vectors were used to purify the designs chosen for biophysical analysis. Most designs were expressed as isolated domains with an additional 21-residue N-terminal sequence containing a His-tag and thrombin cleavage site to aid purification. Genes encoding these designs were obtained from GenScript™ in the pET-28b+ expression vector. The remaining designs were expressed as fusions with the yeast SUMO domain Smt3 using the custom vector pCDB24. Genes encoding these designs were obtained as gBlocks™ from IDT and inserted into the pCDB24 vector via Gibson assembly (63).

[0097] All designs were expressed in E. coli B121* (DE3) cells (Invitrogen). Starter cultures were grown overnight at 37° C. in Luria-Bertani (LB) medium overnight with added antibiotic (50 μg/mi carbenicillin for SUMO expression or 30 μg/ml kanamycin for pET-28b+ expression). These overnight cultures were used to inoculate 500 mL of Studier autoinduction media (64) supplemented with antibiotic, and grown overnight. Cells were harvested by centrifugation at 4° C., resuspended in 25 mL lysis buffer (20 mM imidazole in PBS containing DNAse and protease inhibitors), and lysed by sonication or by microfluidizer. PBS buffer contained 20 mM NaPO₄, 150 mM NaCl, pH 7.4. After removal of insoluble material, the lysates were loaded onto nickel affinity gravity columns to purify the designed proteins by immobilized metal-affinity chromatography (IMAC). Designs expressed as fusions to the SUMO domain were then cleaved from the domain using the Yeast SUMO protease UlpI and dialyzed overnight in PBS at 4° C. to remove excess imidazole before a second IMAC step was used to remove the SUMO tag following cleavage.

[0098] For expression of ¹³C-¹⁵N-labeled protein for NMR analysis, the plasmids were transformed into the Lemo21 E. coli expression strain (NEB) and plated on M9/glucose plates containing kanamycin to 50 ug/mL and chloramphenicol to 34 ug/mL, grown at 37° C. overnight. For the starter culture, a single colony was inoculated into a 250 mL baffled flask containing 50 mL of Luria-Bertani medium, with kanamycin to 50 ug/mL, chloramphenicol to 34 ug/mL, and grown for approximately 18 hours at 37° C., shaking at 225 rpm. 10 mL of the starter culture was then transferred to a 2 L baffled flask containing 0.5 L of Terrific Broth (Difco), with 25 mM Na₂HPO₄, 25 mM KH₂PO₄, 50 mM NH₄Cl, 5 mM Na₂SO₄ kanamycin to 50 ug/mL, and chloramphenicol to 34 ug/mL. This expression culture was grown at 37° C. to an OD₆₀₀ of approximately 1.0, then removed from the flask and spun at 4000 rpm for 15 minutes to pellet the cells. The Terrific Broth was removed, and the cells were washed briefly with 30 mL of PBS. The cells were then transferred to a new 2 L baffled flask containing 0.5 L of labeled media (25 mM Na₂HPO₄, 25 mM KH₂PO₄, 50 mM ¹⁵NH₄Cl, 5 mM Na₂SO₄, 0.2% (w/v) ¹³C glucose), kanamycin to 50 ug/mL and chloramphenicol to 34 ug/mL. The cells were allowed to recover at 37° C. for 30 minutes, then IPTG (Carbosynth) was added to 1 mM and the temperature was reduced to 20° C. The cells were harvested the following day and purified by IMAC. The labeled NH₄Cl and glucose were obtained from Cambridge Isotopes.

### Size-Exclusion Chromatography

[0099] Following IMAC, designs (labeled and unlabeled) were further purified by size-exclusion chromatography on ÄKTAxpress™ (GE Healthcare) using a Superdex™ 75 10/300 GL column (GE Healthcare) in PBS buffer. The monomeric fraction of each run (typically eluting at the 15 mL mark) was collected and immediately analyzed by CD or flash frozen in liquid N₂ for later analysis.

### Circular Dichroism

[0100] Far-ultraviolet CD measurements were carried out with an AVIV spectrometer, model 420. Wavelength scans were measured from 260 to 195 nm at 25 and 95° C. Temperature melts monitored dichroism signal at 220 nm in steps of 2° C./minute with 30 s of equilibration time. Wavelength scans and temperature melts were performed using 0.35 mg/ml protein in PBS buffer (20 mM NaPO₄, 150 mM NaCl, pH 7.4) with a 1 mm path-length cuvette. Chemical denaturation experiments with guanidinium hydrochloride (GuHCl) were performed using an automatic titrator with a protein concentration of 0.035 mg/ml and a 1 cm path-length cuvette with stir bar. The GuHCl concentration was determined by refractive index in PBS buffer. The denaturation process monitored dichroism signal at 220 nm in steps of 0.2 M GdmCl with 1 minute mixing time for each step, at 25° C. Protein concentrations were determined by absorbance at 280 nm measured using a NanoDrop™ spectrophotometer (Thermo Scientific) using predicted extinction coefficients (65). Protein concentrations for designs lacking aromatic amino acids were measured by Qubit™ protein assay (ThermoFisher Scientific).

[0101] Melting temperatures were determined by first smoothing the data with a Savitsky-Golay filter of order 3, then approximating the smoothed data with a cubic spline to compute derivatives. The reported Tm is the inflection point of the melting curve. Chemical denaturation curves were fitted by nonlinear regression to a two-state unfolding model with six-parameters: the folding free energy, m-value, and linear pre- and post-transition baselines with individual slope and intercepts (66).

### NMR Structure Determination

[0102] NMR data acquisition was carried out at 25° C. (HHH_rd1_0142, EHEE_rd1_0284, and EEHEE_rd3_1049) or 15° C. (HEEH_rd4_0097) on Bruker spectrometers operating at 600 or 800 MHz, and equipped with cryogenic probes. All 3D spectra were acquired with non-uniform sampling schemes in the indirect dimensions and were reconstructed by multidimensional decomposition software MDDNMR (67) or (68), interfaced with NMRPipe™ (69). Conventional backbone and NOESY spectra were acquired as described previously (70), and the automated program ABACUS™ (71) was used to aide in the assignment of backbone and sidechain resonances. Initial automated NOE assignments and structure calculations were performed using the noeassign module in CYANA™ 3.0 (72). The best 20 of 100 CYANA™ structures from the final cycle were refined with CNSSOLVE (73) by performing a short restrained molecular dynamics simulation in explicit solvent (74). The NMR structures of the constructs are comprised of the final 20 refined structures.

### Fragment Analysis

[0103] To evaluate agreement between sequence and structure for a given designed protein, we used Rosetta's standard fragment generation protocol (17) to select 200 fragments (9-residue length segments) from natural protein crystal structures for each 9-residue-long segment of the designed protein. The fragments were chosen so that their sequence and secondary structure were as similar as possible to the sequence and predicted secondary structure of the designed protein segment (predicted using PSIPRED™ (75)). If these fragments are highly geometrically similar to the designed segment (measured by RMSD), this indicates that the designed sequence preferentially adopts the designed fold even at the local level, because each local sequence segment is commonly found in its designed local structure when found in solved protein structures.

### Mutational Stability Effects

[0104] Instead of using the minimum of the trypsin and chymotrypsin stability scores as an overall stability score for sequences in the point mutant library, we took advantage of the hundreds of mutants available for each protein to calibrate the trypsin and chymotrypsin stability scales in relation to each other for each set of mutants (i.e. mutants of the same wild-type protein). For example, mutations in EHEE_rd1_0882 that cause a chymotrypsin stability score change of 1.0 typically cause a trypsin stability score change of 1.2 (i.e. the slope of the best-fit line is 1.2; the r² for the two datasets is 0.77). However, mutations to EEHEE_rd3_0037 that cause a chymotrypsin stability score change of 1.0 cause a much larger trypsin stability score change of 2.6 (r²=0.71). Because each set of mutants had a characteristic slope, we used these slopes to combine the trypsin and chymotrypsin measurements and compute a consensus stability score for each mutant. These consensus stability scores were assigned in four steps. First, we identified the subset of mutants for each wild-type protein with high-confidence EC₅₀ values (i.e. those that were precisely measured and were within the dynamic range of protease concentrations tested). Second, these high-confidence measurements were then used to determine the slope and intercept of the best-fit line between the trypsin and chymotrypsin stability scores for each protein by orthogonal distance regression. Third, we mapped each mutant of a given protein onto the best-fit line for that protein at one of three positions: the nearest point on the fit line, the point on the fit line at an identical x-coordinate (chymotrypsin stability score), or the point on the fit line at an identical y-coordinate (trypsin stability score) Finally, after mapping all points onto the fit line, we used the x-coordinate of the mapped point (the location of that point on the chymotrypsin axis) as the overall consensus stability score for each mutant.

[0105] In examining the best-fit lines between the trypsin and chymotrypsin measurements for each mutant set, we observed that mutants whose predicted unfolded state chymotrypsin EC₅₀ values changed significantly from the predicted unfolded state wild-type EC₅₀ value were often outliers in the fit. These outliers suggested that the chymotrypsin unfolded state model was oversensitive to the effects of single amino acid changes, distorting the fits. To improve the estimation of consensus stability scores, we restricted the deviation between each mutant's predicted unfolded state EC₅₀ and the wild-type predicted unfolded state EC₅₀ to a factor of 2.64 in [chymotrypsin] (2^{1,4}). This only affected 1.2% of mutants, and would not have affected any results in FIG. 1 (no mutants in FIG. 1 deviate by this amount from the wild-type predicted unfolded state EC₅₀ value.)

[0106] The average stability effects of each amino acid were calculated using the consensus stability scores described above. To compute the average stability effects using the data, we used the average stability score of the A, E, H, I, M, T, and V mutants at each position as the “baseline” stability at each position (i.e. the average stability score of these mutants was used as the zero-point for a new position-specific stability scale). These amino acids were chosen because they included the different types of amino acid physical properties (polar and hydrophobic, large and small) and because these amino acids generally have minimal impact on a sequence's unfolded state predicted EC₅₀ with either trypsin or chymotrypsin. We then computed the stability of each amino acid at each position relative to this baseline. Finally, we averaged these re-zeroed stability scores across all the different protein sites in a given category (i.e. polar helical positions, edge strand positions, etc.) to determine the average stability effect of each amino acid for that category. The re-zeroing procedure for each site did not affect the relative average stabilities of the different amino acids shown in the figure, but it did lower the associated standard error by removing irrelevant variation in overall protein stability from the measurement. The average stability effects were adjusted a final time to set the mean value of all 20 amino acids to zero. Helical positions were considered to be polar if their wild-type (designed) amino acid was D, B, H, K, N, Q, R, S, T, or Y. The first and last helical turns were defined as the first and last three residues of each helix.

### Natural Protein Compilation

[0107] Our 1,178 natural proteins were compiled by querying the PDB on Feb. 4, 2016 for all structures containing only protein (no lipid, carbohydrate, or nucleic acid), with 1 chain per asymmetric unit, chain length 20-50aa, and no modified residues. We then manually filtered this list to remove all sequences containing Cys residues. Pfam sequences were collected from the seed database of Pfam 28.0, taking the first representative of all families lacking a Cys residue.

### Conservation Analysis in Naturally Occurring Proteins

[0108] Homologous sequences for villin HP35, pin1 WW-domain, and hYAP65 WW-domain were identified using HHblits (76) with an e-value cutoff of 1e-10 and 4 iterations. HHfilter was used to remove sequences that were more than 90% identical or that covered less than 90% of the query sequence (77). Bits of conservation were calculated using WebLogo 3.3 (78).

[0109] The secondary structural arrangements of peptides designed are provided below in Table 1; the amino acid sequences are provided in the accompanying sequence listing.

TABLE 1

| SEQ ID NO: | name |
|---|---|
| SEQ ID NO: 1 | HHH_rd2_0058.pdb |
| SEQ ID NO: 2 | EEHEE_rd3_1702.pdb |
| SEQ ID NO: 3 | EHEE_rd4_0009.pdb |
| SEQ ID NO: 4 | HHH_rd2_0139.pdb |
| SEQ ID NO: 5 | EEHEE_rd3_1058.pdb |
| SEQ ID NO. 6 | HHH_rd2_0040.pdb |
| SEQ ID NO: 7 | HHH_rd2_0161.pdb |
| SEQ ID NO: 8 | HHH_rd4_0231.pdb |
| SEQ ID NO: 9 | HHH_rd2_0175.pdb |
| SEQ ID NO: 10 | HHH_rd4_0996.pdb |
| SEQ ID NO: 11 | HHH_rd2_0158.pdb |
| SEQ ID NO: 12 | HHH_rd4_0734.pdb |
| SEQ ID NO: 13 | HHH_rd4_0289.pdb |
| SEQ ID NO: 14 | HHH_rd2_0031.pdb |
| SEQ ID NO: 15 | HHH_rd4_0167.pdb |
| SEQ ID NO: 16 | HHH_rd4_0353.pdb |
| SEQ ID NO: 17 | EHEE_rd3_0133.pdb |
| SEQ ID NO: 18 | HHH_rd4_0291.pdb |
| SEQ ID NO: 19 | HHH_rd2_0114.pdb |
| SEQ ID NO: 20 | HHH_rd4_0047.pdb |
| SEQ ID NO: 21 | HHH_rd4_0383.pdb |
| SEQ ID NO: 22 | HHH_rd1_0056.pdb |
| SEQ ID NO: 23 | HHH_rd2_0046.pdb |
| SEQ ID NO: 24 | HHH_rd2_0085.pdb |
| SEQ ID NO: 25 | HH_rd4_0303.pdb |
| SEQ ID NO: 26 | HHH_rd2_0039.pdb |
| SEQ ID NO: 27 | EEHEE_rd3_1498.pdb |
| SEQ ID NO: 28 | HHH_rd3_0138.pdb |
| SEQ ID NO: 29 | HHH_rd4_0491.pdb |
| SEQ ID NO: 30 | HHH_rd2_0160.pdb |
| SEQ ID NO: 31 | EEHEE_rd4_0094.pdb |
| SEQ ID NO: 32 | HHH_rd4_0416.pdb |
| SEQ ID NO: 33 | HHH_rd4_0508.pdb |
| SEQ ID NO: 34 | EHEE_rd4_0924.pdb |
| SEQ ID NO: 35 | EHEE_rd2_0005.pdb |
| SEQ ID NO: 36 | HHH_rd4_0920.pdb |
| SEQ ID NO: 37 | HHH_rd4_0130.pdb |
| SEQ ID NO: 38 | HHH_rd4_0819.pdb |
| SEQ ID NO: 39 | HHH_rd4_0049.pdb |
| SEQ ID NO: 40 | HHH_rd3_0008.pdb |
| SEQ ID NO: 41 | EHEE_rd4_0640.pdb |
| SEQ ID NO: 42 | HHH_rd2_0195.pdb |
| SEQ ID NO: 43 | HHH_rd4_0858.pdb |
| SEQ ID NO: 44 | HHH_rd4_0171.pdb |
| SEQ ID NO: 45 | HHH_rd1_0244.pdb |
| SEQ ID NO: 46 | HHH_rd4_0276.pdb |
| SEQ ID NO: 47 | HHH_rd4_0340.pdb |
| SEQ ID NO: 48 | HHH_rd2_0096.pdb |
| SEQ ID NO: 49 | HHH_rd2_0045.pdb |
| SEQ ID NO: 50 | HHH_rd4_0122.pdb |
| SEQ ID NO: 51 | EEHEE_rd4_0057.pdb |
| SEQ ID NO: 52 | HHH_rd4_0179.pdb |
| SEQ ID NO: 53 | HHH_rd4_0581.pdb |
| SEQ ID NO: 54 | HHH_rd4_0159.pdb |
| SEQ ID NO: 55 | HHH_rd4_0116.pdb |
| SEQ ID NO: 56 | HHH_rd4_0044.pdb |
| SEQ ID NO: 57 | HHH_rd4_0132.pdb |
| SEQ ID NO: 58 | EEHEE_rd3_0681.pdb |
| SEQ ID NO: 59 | HHH_rd4_0790.pdb |
| SEQ ID NO: 60 | HHH_rd3_0075.pdb |
| SEQ ID NO: 61 | HHH_rd4_0235.pdb |
| SEQ ID NO: 62 | HHH_rd4_0168.pdb |
| SEQ ID NO: 63 | HHH_rd2_0123.pdb |
| SEQ ID NO: 64 | HHH_rd2_0025.pdb |
| SEQ ID NO: 65 | HHH_rd4_0666.pdb |
| SEQ ID NO: 66 | HHH_rd4_0148.pdb |
| SEQ ID NO: 67 | HHH_rd4_0631.pdb |
| SEQ ID NO: 68 | HHH_rd2_0030.pdb |
| SEQ ID NO: 69 | HHH_rd4_0145.pdb |
| SEQ ID NO: 70 | HHH_rd4_0875.pdb |
| SEQ ID NO: 71 | HHH_rd4_0262.pdb |
| SEQ ID NO: 72 | HHH_rd1_0210.pdb |
| SEQ ID NO: 73 | EHEE_rd3_0124.pdb |
| SEQ ID NO: 74 | HHH_rd4_0619.pdb |
| SEQ ID NO: 75 | HHH_rd4_0141.pdb |
| SEQ ID NO: 76 | EEHEE_rd4_0193.pdb |
| SEQ ID NO: 77 | HHH_rd2_0205.pdb |
| SEQ ID NO: 78 | HHH_rd3_0169.pdb |
| SEQ ID NO: 79 | HHH_rd4_0926.pdb |
| SEQ ID NO: 80 | HHH_rd3_0173.pdb |
| SEQ ID NO: 81 | HHH_rd2_0005.pdb |
| SEQ ID NO: 82 | HHH_rd3_0014.pdb |
| SEQ ID NO: 83 | HHH_rd4_0022.pdb |
| SEQ ID NO: 84 | HHH.rd4_0723.pdb |
| SEQ ID NO: 85 | HHH_rd4_0189.pdb |
| SEQ ID NO: 86 | HHH_rd4_0277.pdb |
| SEQ ID NO: 87 | HHH_rd4_0084.pdb |
| SEQ ID NO: 88 | HHH_rd4_0758.pdb |
| SEQ ID NO: 89 | EEHEE_rd4_0216.pdb |
| SEQ ID NO: 90 | HHH_rd3_0048.pdb |
| SEQ ID NO: 91 | HHH_rd4_0859.pdb |
| SEQ ID NO: 92 | HHH_rd4_0325.pdb |
| SEQ ID NO: 93 | EEHEE_rd4_0159.pdb |
| SEQ ID NO: 94 | EHEE_rd2_0008.pdb |
| SEQ ID NO: 95 | EEHEE_rd4_0002.pdb |
| SEQ ID NO: 96 | HHH_rd4_0260.pdb |
| SEQ ID NO: 97 | HHH_rd4_0549.pdb |
| SEQ ID NO: 98 | HHH_rd4_0177.pdb |
| SEQ ID NO: 99 | HHH_rd3_0085.pdb |
| SEQ ID NO: 100 | HHH_rd4_0001.pdb |
| SEQ ID NO: 101 | HHH_rd4_0836.pdb |
| SEQ ID NO: 102 | HHH_rd4_0237.pdb |
| SEQ ID NO: 103 | EEHEE_rd3_0095.pdb |
| SEQ ID NO: 104 | HHH_rd4_0928.pdb |
| SEQ ID NO: 105 | HHH_rd1_0061.pdb |
| SEQ ID NO: 106 | HHH_rd4_0088.pdb |
| SEQ ID NO: 107 | HHH_rd4_0027.pdb |
| SEQ ID NO: 108 | HHH_rd4_0580.pdb |
| SEQ ID NO: 109 | EHEE_rd2_0331.pdb |
| SEQ ID NO: 110 | HHH_rd2_0143.pdb |
| SEQ ID NO: 111 | EHEE_rd4_0079.pdb |
| SEQ ID NO: 112 | HHH_rd4_0853.pdb |
| SEQ ID NO: 113 | HHH_rd4_0395.pdb |
| SEQ ID NO: 114 | HHH_rd4_0211.pdb |
| SEQ ID NO: 115 | HHH_rd3_0215.pdb |
| SEQ ID NO: 116 | HHH_rd4_0579.pdb |
| SEQ ID NO: 117 | EHEE_rd2_0840.pdb |
| SEQ ID NO: 118 | HHH_rd4_0067.pdb |
| SEQ ID NO: 119 | HHH_rd4_0833.pdb |
| SEQ ID NO: 120 | HHH_rd4_0228.pdb |
| SEQ ID NO: 121 | EEHEE_rd4_0022.pdb |
| SEQ ID NO: 122 | HHH_rd4_0134.pdb |
| SEQ ID NO: 123 | HHH_rd4_0013.pdb |
| SEQ ID NO: 124 | HHH_rd4_0175.pdb |
| SEQ ID NO: 125 | HHH_rd1_0087.pdb |
| SEQ ID NO: 126 | EEHEE_rd3_1136.pdb |
| SEQ ID NO: 127 | HHH_rd4_0709.pdb |
| SEQ ID NO: 128 | HHH_rd2_0074.pdb |
| SEQ ID NO: 129 | HHH_rd1_0579.pdb |
| SEQ ID NO: 130 | EEHEE_rd4_0484.pdb |
| SEQ ID NO: 131 | HHH_rd4_0468.pdb |
| SEQ ID NO: 132 | HHH_rd4_0492.pdb |
| SEQ ID NO: 133 | HHH_rd4_0552.pdb |
| SEQ ID NO: 134 | HHH_rd4_0616.pdb |
| SEQ ID NO: 135 | HHH_rd3_0199.pdb |
| SEQ ID NO: 136 | HHH_rd4_0467.pdb |
| SEQ ID NO: 137 | EEHEE_rd4_0097.pdb |
| SEQ ID NO: 138 | HHH_rd1_0537.pdb |
| SEQ ID NO: 139 | HHH_rd2_0023.pdb |
| SEQ ID NO: 140 | HHH_rd4_0456.pdb |
| SEQ ID NO: 141 | HHH_rd4_0050.pdb |
| SEQ ID NO: 142 | HHH_rd4_0100.pdb |
| SEQ ID NO: 143 | HHH_rd4_0992.pdb |
| SEQ ID NO: 144 | HHH_rd4_0673.pdb |
| SEQ ID NO: 145 | EEHEE_rd3_1817.pdb |
| SEQ ID NO: 146 | HHH_rd3_0107.pdb |
| SEQ ID NO: 147 | HHH_rd4_0682.pdb |
| SEQ ID NO: 148 | HHH_rd2_0063.pdb |
| SEQ ID NO: 149 | HHH_rd2_0032.pdb |
| SEQ ID NO: 150 | HHH_rd4_0003.pdb |
| SEQ ID NO: 151 | EEHEE_rd4_0060.pdb |
| SEQ ID NO: 152 | HHH_rd4_0373.pdb |
| SEQ ID NO: 153 | HHH_rd4_0575.pdb |
| SEQ ID NO: 154 | HHH_rd4_0012.pdb |
| SEQ ID NO: 155 | HHH_rd3_0091.pdb |
| SEQ ID NO: 156 | EHEE_rd4_0196.pdb |
| SEQ ID NO: 157 | EHEE_rd4_0096.pdb |
| SEQ ID NO: 158 | HHH_rd2_0166.pdb |
| SEQ ID NO: 159 | HHH_rd2_0013.pdb |
| SEQ ID NO: 160 | HHH_rd4_0849.pdb |
| SEQ ID NO: 161 | EEHEE_rd4_0005.pdb |
| SEQ ID NO: 162 | HHH_rd4_0728.pdb |
| SEQ ID NO: 163 | HHH_rd4_0804.pdb |
| SEQ ID NO: 164 | HHH_rd4_0869.pdb |
| SEQ ID NO: 165 | HHH_rd4_0745.pdb |
| SEQ ID NO: 166 | HHH_rd4_0934.pdb |
| SEQ ID NO: 167 | EHEE_rd4_0653.pdb |
| SEQ ID NO: 168 | HHH_rd3_0231.pdb |
| SEQ ID NO: 169 | HHH_rd3_0004.pdb |
| SEQ ID NO: 170 | HHH_rd4_0188.pdb |
| SEQ ID NO: 171 | HHH_rd3_0022.pdb |
| SEQ ID NO: 172 | HHH_rd4_0162.pdb |
| SEQ ID NO: 173 | HHH_rd4_0640.pdb |
| SEQ ID NO: 174 | HHH_rd4_0684.pdb |
| SEQ ID NO: 175 | HHH_rd2_0201.pdb |
| SEQ ID NO: 176 | EEHEE_rd3_1220.pdb |
| SEQ ID NO: 177 | EEHEE_rd4_0430.pdb |
| SEQ ID NO: 178 | HHH_rd2_0218.pdb |
| SEQ ID NO: 179 | HHH_rd1_0071.pdb |
| SEQ ID NO: 180 | EHEE_rd4_0130.pdb |
| SEQ ID NO: 181 | HHH_rd4_0612.pdb |
| SEQ ID NO: 182 | HHH_rd4_0808.pdb |
| SEQ ID NO: 183 | EHEE_rd4_0213.pdb |
| SEQ ID NO: 184 | HHH_rd4_0017.pdb |
| SEQ ID NO: 185 | HHH_rd4_0779.pdb |
| SEQ ID NO: 186 | HHH_rd2_0094.pdb |
| SEQ ID NO: 187 | EHEE_rd2_1044.pdb |
| SEQ ID NO: 188 | HHH_rd4_0498.pdb |
| SEQ ID NO: 189 | HHH_rd4_0151.pdb |
| SEQ ID NO: 190 | HHH_rd4_0374.pdb |
| SEQ ID NO: 191 | HHH_rd4_0834.pdb |
| SEQ ID NO: 192 | HHH_rd3_0029.pdb |
| SEQ ID NO: 193 | HHH_rd4_0396.pdb |
| SEQ ID NO: 194 | HHH_rd4_0052.pdb |
| SEQ ID NO: 195 | EHEE_rd2_1260.pdb |
| SEQ ID NO: 196 | EHEE_rd4_0726.pdb |
| SEQ ID NO: 197 | HHH_rd3_0165.pdb |
| SEQ ID NO: 198 | HHH_rd3_0005.pdb |
| SEQ ID NO: 199 | EEHEE_rd3_1049.pdb |
| SEQ ID NO: 200 | HHH_rd4_0528.pdb |
| SEQ ID NO: 201 | EHEE_rd4_0510.pdb |
| SEQ ID NO: 202 | EEHEE_rd4_0029.pdb |
| SEQ ID NO: 203 | HHH_rd4_0752.pdb |
| SEQ ID NO: 204 | HHH_rd4_0722.pdb |
| SEQ ID NO: 205 | HHH_rd4_0028.pdb |
| SEQ ID NO: 206 | EEHEE_rd4_0759.pdb |
| SEQ ID NO: 207 | HHH_rd4_0452.pdb |
| SEQ ID NO: 208 | EEHEE_rd4_0026.pdb |
| SEQ ID NO: 209 | HHH_rd4_0056.pdb |
| SEQ ID NO: 210 | EHEE_rd4_0087.pdb |
| SEQ ID NO: 211 | HHH_rd4_0300.pdb |
| SEQ ID NO: 212 | EEHEE_rd4_0489.pdb |
| SEQ ID NO: 213 | EEHEE_rd3_0160.pdb |
| SEQ ID NO: 214 | HHH_rd4_0304.pdb |
| SEQ ID NO: 215 | HHH_rd4_0887.pdb |
| SEQ ID NO: 216 | EEHEE_rd4_0087.pdb |
| SEQ ID NO: 217 | HHH_rd4_0358.pdb |
| SEQ ID NO: 218 | HHH_rd2_0186.pdb |
| SEQ ID NO: 219 | EEHEE_rd4_0076.pdb |
| SEQ ID NO: 220 | EEHEE_rd4_0399.pdb |
| SEQ ID NO: 221 | EHEE_rd2_1263.pdb |
| SEQ ID NO: 222 | HHH_rd3_0050.pdb |
| SEQ ID NO: 223 | HHH_rd4_0218.pdb |
| SEQ ID NO: 224 | EEHEE_rd4_0063.pdb |
| SEQ ID NO: 225 | HHH_rd4_0005.pdb |
| SEQ ID NO: 226 | HHH_rd2_0089.pdb |
| SEQ ID NO: 227 | HHH_rd2_0104.pdb |
| SEQ ID NO: 228 | EEHEE_rd4_0240.pdb |
| SEQ ID NO: 229 | EHEE_rd4_0162.pdb |
| SEQ ID NO: 230 | HEEH_rd3_0140.pdb |
| SEQ ID NO: 231 | HHH_rd4_0599.pdb |
| SEQ ID NO: 232 | HHH_rd4_0031.pdb |
| SEQ ID NO: 233 | HHH_rd4_0402.pdb |
| SEQ ID NO: 234 | HHH_rd4_0213.pdb |
| SEQ ID NO: 235 | HHH_rd4_0384.pdb |
| SEQ ID NO: 236 | HHH_rd4_0225.pdb |
| SEQ ID NO: 237 | HHH_rd4_0504.pdb |
| SEQ ID NO: 238 | EEHEE_rd4_0182.pdb |
| SEQ ID NO: 239 | EHEE_rd4_0468.pdb |
| SEQ ID NO: 240 | HHH_rd4_0314.pdb |
| SEQ ID NO: 241 | EHEE_rd3_0004.pdb |
| SEQ ID NO: 242 | HHH_rd4_0787.pdb |
| SEQ ID NO: 243 | HHH_rd4_0832.pdb |
| SEQ ID NO: 244 | HHH_rd4_0400.pdb |
| SEQ ID NO: 245 | HHH_rd3_0122.pdb |
| SEQ ID NO: 246 | HHH_rd4_0737.pdb |
| SEQ ID NO: 247 | EHEE_rd4_0195.pdb |
| SEQ ID NO: 248 | EHEE_rd4_0017.pdb |
| SEQ ID NO: 249 | EHEE_rd2_0801.pdb |
| SEQ ID NO: 250 | HHH_rd3_0234.pdb |
| SEQ ID NO: 251 | HHH_rd4_0547.pdb |
| SEQ ID NO: 252 | HHH_rd3_0052.pdb |
| SEQ ID NO: 253 | HHH_rd4_0618.pdb |
| SEQ ID NO: 254 | HHH_rd1_0096.pdb |
| SEQ ID NO: 255 | HHH_rd4_0820.pdb |
| SEQ ID NO: 256 | HHH_rd4_0110.pdb |
| SEQ ID NO: 257 | HHH_rd4_0414.pdb |
| SEQ ID NO: 258 | HHH_rd4_0877.pdb |
| SEQ ID NO: 259 | HHH_rd4_0103.pdb |
| SEQ ID NO: 260 | EEHEE_rd4_0153.pdb |
| SEQ ID NO: 261 | EEHEE_rd4_0028.pdb |
| SEQ ID NO: 262 | HHH_rd4_0333.pdb |
| SEQ ID NO: 263 | HHH_rd4_05551.pdb |
| SEQ ID NO: 264 | HHH_rd2_0084.pdb |
| SEQ ID NO: 265 | HHH_rd4_0227.pdb |
| SEQ ID NO: 266 | HHH_rd4_0811.pdb |
| SEQ ID NO: 267 | HHH_rd4_0462.pdb |
| SEQ ID NO: 268 | HHH_rd4_0428.pdb |
| SEQ ID NO: 269 | HHH_rd4_0348.pdb |
| SEQ ID NO: 270 | HHH_rd4_0827.pdb |
| SEQ ID NO: 271 | EEHEE_rd4_0050.pdb |
| SEQ ID NO: 272 | HHH_rd4_0155.pdb |
| SEQ ID NO: 273 | HHH_rd3_0079.pdb |
| SEQ ID NO: 274 | HHH_rd4_0810.pdb |
| SEQ ID NO: 275 | EHEE_rd4_0012.pdb |
| SEQ ID NO: 276 | HHH_rd4_0386.pdb |
| SEQ ID NO: 277 | EEHEE_rd4_0079.pdb |
| SEQ ID NO: 278 | HHH_rd4_0343.pdb |
| SEQ ID NO: 279 | HHH_rd4_0782.pdb |
| SEQ ID NO: 280 | HHH_rd1_0406.pdb |
| SEQ ID NO: 281 | HHH_rd4_0085.pdb |
| SEQ ID NO: 282 | HHH_rd3_0012.pdb |
| SEQ ID NO: 283 | EEHEE_rd3_1630.pdb |
| SEQ ID NO: 284 | HHH_rd4_0092.pdb |
| SEQ ID NO: 285 | HHH_rd3_0061.pdb |
| SEQ ID NO: 286 | HHH_rd2_0091.pdb |
| SEQ ID NO: 287 | HHH_rd4_0676.pdb |
| SEQ ID NO: 288 | EHEE_rd4_0467.pdb |
| SEQ ID NO: 289 | HHH_rd4_0550.pdb |
| SEQ ID NO: 290 | EEHEE_rd4_0011.pdb |
| SEQ ID NO: 291 | HHH_rd4_0081.pdb |
| SEQ ID NO: 292 | HHH_rd2_0235.pdb |
| SEQ ID NO: 293 | HHH_rd4_0812.pdb |
| SEQ ID NO: 294 | HHH_rd4_0514.pdb |
| SEQ ID NO: 295 | HHH_rd4_0870.pdb |
| SEQ ID NO: 296 | HHH_rd4_0882.pdb |
| SEQ ID NO: 297 | EHEE_rd4_0064.pdb |
| SEQ ID NO: 298 | HHH_rd4_0317.pdb |
| SEQ ID NO: 299 | HHH_rd1_0076.pdb |
| SEQ ID NO: 300 | HHH_rd4_0556.pdb |
| SEQ ID NO: 301 | HHH_rd4_0055.pdb |
| SEQ ID NO: 302 | HHH_rd4_0768.pdb |
| SEQ ID NO: 303 | HHH_rd4_0590.pdb |
| SEQ ID NO: 304 | HHH_rd4_0154.pdb |
| SEQ ID NO: 305 | EHEE_rd4_0713.pdb |
| SEQ ID NO: 306 | HHH_rd4_0606.pdb |
| SEQ ID NO: 307 | HHH_rd4_0609.pdb |
| SEQ ID NO: 308 | HHH_rd4_0332.pdb |
| SEQ ID NO: 309 | EEHEE_rd4_0384.pdb |
| SEQ ID NO: 310 | HHH_rd4_0098.pdb |
| SEQ ID NO: 311 | HHH_rd4_0200.pdb |
| SEQ ID NO: 312 | EHEE_rd3_0233.pdb |
| SEQ ID NO: 313 | HHH_rd4_0868.pdb |
| SEQ ID NO: 314 | HHH_rd4_0244.pdb |
| SEQ ID NO: 315 | HHH_rd4_0087.pdb |
| SEQ ID NO: 316 | HHH_rd4_0670.pdb |
| SEQ ID NO: 317 | HHH_rd2_0088.pdb |
| SEQ ID NO: 318 | EEHEE_rd4_0014.pdb |
| SEQ ID NO: 319 | HHH_rd4_0372.pdb |
| SEQ ID NO: 320 | HHH_rd1_0089.pdb |
| SEQ ID NO: 321 | HHH_rd2_0247.pdb |
| SEQ ID NO: 322 | HHH_rd4_0346.pdb |
| SEQ ID NO: 323 | HHH_rd4_0066.pdb |
| SEQ ID NO: 324 | HHH_rd1_0084.pdb |
| SEQ ID NO: 325 | HHH_rd4_0658.pdb |
| SEQ ID NO: 326 | HHH_rd4_0602.pdb |
| SEQ ID NO: 327 | EHEE_rd4_0183.pdb |
| SEQ ID NO: 328 | HHH_rd4_0760.pdb |
| SEQ ID NO: 329 | EHEE_rd4_0043.pdb |
| SEQ ID NO: 330 | HHH_rd4_0163.pdb |
| SEQ ID NO: 331 | EHEE_rd3_0024.pdb |
| SEQ ID NO: 332 | EEHEE_rd4_0298.pdb |
| SEQ ID NO: 333 | HHH_rd2_0075.pdb |
| SEQ ID NO: 334 | HHH_rd2_0086.pdb |
| SEQ ID NO: 335 | HHH_rd2_0227.pdb |
| SEQ ID NO: 336 | HHH_rd4_0041.pdb |
| SEQ ID NO: 337 | HHH_rd3_0060.pdb |
| SEQ ID NO: 338 | HHH_rd4_0139.pdb |
| SEQ ID NO: 339 | HHH_rd4_0038.pdb |
| SEQ ID NO: 340 | EEHEE_rd4_0418.pdb |
| SEQ ID NO: 341 | EEHEE_rd4_0241.pdb |
| SEQ ID NO: 342 | HHH_rd4_0344.pdb |
| SEQ ID NO: 343 | HHH_rd4_0518.pdb |
| SEQ ID NO: 344 | HHH_rd4_0382.pdb |
| SEQ ID NO: 345 | HHH_rd4_0014.pdb |
| SEQ ID NO: 346 | EHEE_rd4_0826.pdb |
| SEQ ID NO: 347 | HHH_rd1_0112.pdb |
| SEQ ID NO: 348 | HHH_rd4_0643.pdb |
| SEQ ID NO: 349 | HHH_rd3_0094.pdb |
| SEQ ID NO: 350 | EHEE_rd4_0125.pdb |
| SEQ ID NO: 351 | HHH_rd4_0702.pdb |
| SEQ ID NO: 352 | HHH_rd4_0717.pdb |
| SEQ ID NO: 353 | EEHEE_rd4_0064.pdb |
| SEQ ID NO: 354 | HHH_rd4_0629.pdb |
| SEQ ID NO: 355 | HHH_rd4_0302.pdb |
| SEQ ID NO: 356 | HHH_rd4_0011.pdb |
| SEQ ID NO: 357 | HHH_rd4_0094.pdb |
| SEQ ID NO: 358 | HHH_rd4_0086.pdb |
| SEQ ID NO: 359 | HHH_rd3_0160.pdb |
| SEQ ID NO: 360 | HHH_rd4_0409.pdb |
| SEQ ID NO: 361 | HHH_rd2_0097.pdb |
| SEQ ID NO: 362 | HHH_rd4_0746.pdb |
| SEQ ID NO: 363 | HHH_rd1_0083.pdb |
| SEQ ID NO: 364 | HHH_rd4_0034.pdb |
| SEQ ID NO: 365 | EHEE_rd4_0202.pdb |
| SEQ ID NO: 366 | EEHEE_rd4_0229.pdb |
| SEQ ID NO: 367 | HHH_rd4_0903.pdb |
| SEQ ID NO: 368 | HHH_rd4_0355.pdb |
| SEQ ID NO: 369 | HHH_rd4_0390.pdb |
| SEQ ID NO: 370 | HHH_rd3_0239.pdb |
| SEQ ID NO: 371 | HHH_rd4_0705.pdb |
| SEQ ID NO: 372 | EHEE_rd4_0439.pdb |
| SEQ ID NO: 373 | HHH_rd4_0204.pdb |
| SEQ ID NO: 374 | EEHEE_rd4_0570.pdb |
| SEQ ID NO: 375 | EEHEE_rd4_0071.pdb |
| SEQ ID NO: 376 | HHH_rd4_0566.pdb |
| SEQ ID NO: 377 | HHH_rd4_0202.pdb |
| SEQ ID NO: 378 | HHH_rd4_0181.pdb |
| SEQ ID NO: 379 | EEHEE_rd3_1685.pdb |
| SEQ ID NO: 380 | HHH_rd4_0252.pdb |
| SEQ ID NO: 381 | HHH_rd4_0064.pdb |
| SEQ ID NO: 382 | HHH_rd4_0128.pdb |
| SEQ ID NO: 383 | EEHEE_rd4_0350.pdb |
| SEQ ID NO: 384 | EEHEE_rd4_0275.pdb |
| SEQ ID NO: 385 | HHH_rd3_0065.pdb |
| SEQ ID NO: 386 | EEHEE_rd4_0048.pdb |
| SEQ ID NO: 387 | EEHEE_jd4_0006.pdb |
| SEQ ID NO: 388 | HHH_rd4_0733.pdb |
| SEQ ID NO: 389 | HHH_rd3_0051.pdb |
| SEQ ID NO: 390 | EEHEE_rd4_0260.pdb |
| SEQ ID NO: 391 | HHH_rd4_0977.pdb |
| SEQ ID NO: 392 | HHH_rd4_0738.pdb |
| SEQ ID NO: 393 | HHH_rd4_0740.pdb |
| SEQ ID NO: 394 | HHH_rd4_0715.pdb |
| SEQ ID NO: 395 | EEHEE_rd4_0698.pdb |
| SEQ ID NO: 396 | HHH_rd4_0342.pdb |
| SEQ ID NO: 397 | HHH_rd1_0115.pdb |
| SEQ ID NO: 398 | HHH_rd2_0119.pdb |
| SEQ ID NO: 399 | EHEE_rd4_0451.pdb |
| SEQ ID NO: 400 | HHH_rd4_0095.pdb |
| SEQ ID NO: 401 | HHH_rd4_0107.pdb |
| SEQ ID NO: 402 | EHEE_rd4_0101.pdb |
| SEQ ID NO: 403 | EHEE_rd2_1003.pdb |
| SEQ ID NO: 404 | HHH_rd4_0152.pdb |
| SEQ ID NO: 405 | EHEE_rd4_0488.pdb |
| SEQ ID NO: 406 | EEHEE_rd4_0078.pdb |
| SEQ ID NO: 407 | HHH_rd4_0521.pdb |
| SEQ ID NO: 408 | HHH_rd2_0194.pdb |
| SEQ ID NO: 409 | HHH_rd4_0601.pdb |
| SEQ ID NO: 410 | HHH_rd2_0135.pdb |
| SEQ ID NO: 411 | HHH_rd4_0802.pdb |
| SEQ ID NO: 412 | EHEE_rd4_0021.pdb |
| SEQ ID NO: 413 | HHH_rd2_0132.pdb |
| SEQ ID NO: 414 | HHH_rd3_0240.pdb |
| SEQ ID NO: 415 | HHH_rd4_0048.pdb |
| SEQ ID NO: 416 | HHH_rd1_0411.pdb |
| SEQ ID NO: 417 | HHH_rd3_0230.pdb |
| SEQ ID NO: 418 | EEHEE_rd4_0210.pdb |
| SEQ ID NO: 419 | EEHEE_rd3_0654.pdb |
| SEQ ID NO: 420 | EHEE_rd2_0979.pdb |
| SEQ ID NO: 421 | HHH_rd1_0028.pdb |
| SEQ ID NO: 422 | HHH_rd2_0239.pdb |
| SEQ ID NO: 423 | HHH_rd2_0156.pdb |
| SEQ ID NO: 424 | HHH_rd3_0195.pdb |
| SEQ ID NO: 425 | EEHEE_rd4_0001.pdb |
| SEQ ID NO: 426 | EEHEE_rd4_0070.pdb |
| SEQ ID NO: 427 | HHH_rd4_0867.pdb |
| SEQ ID NO: 428 | HHH_rd4_0463.pdb |
| SEQ ID NO: 429 | HHH_rd4_0429.pdb |
| SEQ ID NO: 430 | EEHEE_rd4_0160.pdb |
| SEQ ID NO: 431 | EEHEE_rd4_0208.pdb |
| SEQ ID NO: 432 | HHH_rd4_0053.pdb |
| SEQ ID NO: 433 | EHEE_rd4_0158.pdb |
| SEQ ID NO: 434 | HHH_rd2_0234.pdb |
| SEQ ID NO: 435 | EHEE_rd2_0176.pdb |
| SEQ ID NO: 436 | HHH_rd1_0102.pdb |
| SEQ ID NO: 437 | HHH_rd4_0454.pdb |
| SEQ ID NO: 438 | HHH_rd4_0326.pdb |
| SEQ ID NO: 439 | HHH_rd4_0593.pdb |
| SEQ ID NO: 440 | EHEE_rd3_0015.pdb |
| SEQ ID NO: 441 | HHH_rd4_{——}0656.pdb |
| SEQ ID NO: 442 | HHH_rd1_0533.pdb |
| SEQ ID NO: 443 | EHEE_rd4_0972.pdb |
| SEQ ID NO: 444 | HHH_rd4_0534.pdb |
| SEQ ID NO: 445 | EHEE_rd2_0772.pdb |
| SEQ ID NO: 446 | EEHEE_rd4_0023.pdb |
| SEQ ID NO: 447 | HHH_rd3_0151.pdb |
| SEQ ID NO: 448 | HHH_rd3_0219.pdb |
| SEQ ID NO: 449 | HHH_rd4_0800.pdb |
| SEQ ID NO: 450 | EEHEE_rd4_0221.pdb |
| SEQ ID NO: 451 | HHH_rd4_0338.pdb |
| SEQ ID NO: 452 | HHH_rd4_0079.pdb |
| SEQ ID NO: 453 | HHH_rd4_0837.pdb |
| SEQ ID NO: 454 | HHH_rd4_0866.pdb |
| SEQ ID NO: 455 | HHH_rd1_0307.pdb |
| SEQ ID NO: 456 | HHH_rd3_0177.pdb |
| SEQ ID NO: 457 | EEHEE_rd4_0125.pdb |
| SEQ ID NO: 458 | HHH_rd3_0213.pdb |
| SEQ ID NO: 459 | EEHEE_rd3_1244.pdb |
| SEQ ID NO: 460 | EEHEE_rd4_0870.pdb |
| SEQ ID NO: 461 | HHH_rd1_0120.pdb |
| SEQ ID NO: 462 | EEHEE_rd4_0256.pdb |
| SEQ ID NO: 463 | EEHEE_rd4_0062.pdb |
| SEQ ID NO: 464 | HHH_rd4_0285.pdb |
| SEQ ID NO: 465 | EEHEE_rd4_0024.pdb |
| SEQ ID NO: 466 | EHEE_rd4_0177.pdb |
| SEQ ID NO: 467 | EEHEE_rd4_0327.pdb |
| SEQ ID NO: 468 | HHH_rd2_0155.pdb |
| SEQ ID NO: 469 | HHH_rd4_0310.pdb |
| SEQ ID NO: 470 | HHH_rd1_0260.pdb |
| SEQ ID NO: 471 | HHH_rd4_0461.pdb |
| SEQ ID NO: 472 | EHEE_rd2_0251.pdb |
| SEQ ID NO: 473 | EEHEE_rd3_1034.pdb |
| SEQ ID NO: 474 | EHEE_rd4_0571.pdb |
| SEQ ID NO: 475 | HHH_rd2_0019.pdb |
| SEQ ID NO: 476 | HHH_rd4_0196.pdb |
| SEQ ID NO: 477 | EHEE_rd4_0657.pdb |
| SEQ ID NO: 478 | EHEE_rd4_0630.pdb |
| SEQ ID NO: 479 | HHH_rd4_0567.pdb |
| SEQ ID NO: 480 | EHEE_rd2_0473.pdb |
| SEQ ID NO: 481 | HHH_rd4_0404.pdb |
| SEQ ID NO: 482 | HHH_rd4_0089.pdb |
| SEQ ID NO: 483 | EEHEE_rd4_0664.pdb |
| SEQ ID NO: 484 | HHH_rd4_0794.pdb |
| SEQ ID NO: 485 | EHEE_rd3_0011.pdb |
| SEQ ID NO: 486 | HHH_rd2_0221.pdb |
| SEQ ID NO: 487 | HHH_rd4_0776.pdb |
| SEQ ID NO: 488 | HHH_rd4_0950.pdb |
| SEQ ID NO: 489 | HHH_rd4_0273.pdb |
| SEQ ID NO: 490 | HHH_rd4_0265.pdb |
| SEQ ID NO: 491 | HHH_rd4_0138.pdb |
| SEQ ID NO: 492 | HHH_rd4_0259.pdb |
| SEQ ID NO: 493 | HHH_rd4_0296.pdb |
| SEQ ID NO: 494 | HHH_rd4_0587.pdb |
| SEQ ID NO: 495 | HHH_rd4_0060.pdb |
| SEQ ID NO: 496 | HHH_rd3_0040.pdb |
| SEQ ID NO: 497 | EHEE_rd4_0365.pdb |
| SEQ ID NO: 498 | HHH_rd4_0592.pdb |
| SEQ ID NO: 499 | HHH_rd4_0269.pdb |
| SEQ ID NO: 500 | EEHEE_rd4_0165.pdb |
| SEQ ID NO: 501 | HHH_rd4_0667.pdb |
| SEQ ID NO: 502 | EEHEE_rd3_0977.pdb |
| SEQ ID NO: 503 | EHEE_rd2_0066.pdb |
| SEQ ID NO: 504 | HHH_rd1_0135.pdb |
| SEQ ID NO: 505 | HHH_rd1_0837.pdb |
| SEQ ID NO: 506 | EHEE_rd4_0325.pdb |
| SEQ ID NO: 507 | HHH_rd4_0320.pdb |
| SEQ ID NO: 508 | HHH_rd1_0082.pdb |
| SEQ ID NO: 509 | HHH_rd1_0224.pdb |
| SEQ ID NO: 510 | EHEE_rd4_0136.pdb |
| SEQ ID NO: 511 | HHH_rd4_0915.pdb |
| SEQ ID NO: 512 | HHH_rd4_0943.pdb |
| SEQ ID NO: 513 | EEHEE_rd4_0429.pdb |
| SEQ ID NO: 514 | EHEE_rd4_0338.pdb |
| SEQ ID NO: 515 | HHH_rd4_0161.pdb |
| SEQ ID NO: 516 | HHH_rd4_0315.pdb |
| SEQ ID NO: 517 | EEHEE_rd4_0190.pdb |
| SEQ ID NO: 518 | HHH_rd3_0097.pdb |
| SEQ ID NO: 519 | EHEE_rd2_0074.pdb |
| SEQ ID NO: 520 | HHH_rd4_0007.pdb |
| SEQ ID NO: 521 | EEHEE_rd4_0007.pdb |
| SEQ ID NO: 522 | HHH_rd4_0399.pdb |
| SEQ ID NO: 523 | EHEE_rd4_0025.pdb |
| SEQ ID NO: 524 | HHH_rd3_0147.pdb |
| SEQ ID NO: 525 | EEHEE_rd4_0069.pdb |
| SEQ ID NO: 526 | HHH_rd4_0226.pdb |
| SEQ ID NO: 527 | EEHEE_rd4_0173.pdb |
| SEQ ID NO: 528 | HHH_rd1_0320.pdb |
| SEQ ID NO: 529 | HHH_rd3_0226.pdb |
| SEQ ID NO: 530 | EHEE_rd4_0833.pdb |
| SEQ ID NO: 531 | HHH_rd4_0578.pdb |
| SEQ ID NO: 532 | EEHEE_rd4_0348.pdb |
| SEQ ID NO: 533 | HHH_rd4_0361.pdb |
| SEQ ID NO: 534 | EEHEE_rd4_0456.pdb |
| SEQ ID NO: 535 | HHH_rd4_0071.pdb |
| SEQ ID NO: 536 | HHH_rd3_0208.pdb |
| SEQ ID NO: 537 | HHH_rd4_0075.pdb |
| SEQ ID NO: 538 | HHH_rd4_0248.pdb |
| SEQ ID NO: 539 | HHH_rd4_0197.pdb |
| SEQ ID NO: 540 | HHH_rd4_0474.pdb |
| SEQ ID NO: 541 | HHH_rd3_0193.pdb |
| SEQ ID NO: 542 | HHH_rd4_0621.pdb |
| SEQ ID NO: 543 | HHH_rd3_0011.pdb |
| SEQ ID NO: 544 | HHH_rd3_0144.pdb |
| SEQ ID NO: 545 | HHH_rd4_0437.pdb |
| SEQ ID NO: 546 | HHH_rd3_0146.pdb |
| SEQ ID NO: 547 | EHEE_rd4_0260.pdb |
| SEQ ID NO: 548 | EHEE_rd1_0101.pdb |
| SEQ ID NO: 549 | HHH_rd4_0120.pdb |
| SEQ ID NO: 550 | HHH_rd1_0247.pdb |
| SEQ ID NO: 551 | HHH_rd4_0854.pdb |
| SEQ ID NO: 552 | EEHEE_rd4_0072.pdb |
| SEQ ID NO: 553 | HHH_rd4_0356.pdb |
| SEQ ID NO: 554 | HHH_rd4_0895.pdb |
| SEQ ID NO: 555 | EEHEE_rd4_0197.pdb |
| SEQ ID NO: 556 | EHEE_rd4_0360.pdb |
| SEQ ID NO: 557 | HHH_rd4_0600.pdb |
| SEQ ID NO: 558 | HHH_rd4_0914.pdb |
| SEQ ID NO: 559 | HHH_rd4_0212.pdb |
| SEQ ID NO: 560 | HHH_rd4_0798.pdb |
| SEQ ID NO: 561 | HHH_rd4_0169.pdb |
| SEQ ID NO: 562 | HHH_rd4_0847.pdb |
| SEQ ID NO: 563 | HHH_rd4_0793.pdb |
| SEQ ID NO: 564 | HHH_rd4_0004.pdb |
| SEQ ID NO: 565 | HHH_rd4_0029.pdb |
| SEQ ID NO: 566 | HHH_rd4_0741.pdb |
| SEQ ID NO: 567 | EHEE_rd4_0821.pdb |
| SEQ ID NO: 568 | HHH_rd4_0287.pdb |
| SEQ ID NO: 569 | EHEE_rd4_0088.pdb |
| SEQ ID NO: 570 | HHH_rd4_0061.pdb |
| SEQ ID NO: 571 | HHH_rd3_0059.pdb |
| SEQ ID NO: 572 | EEHEE_rd4_0785.pdb |
| SEQ ID NO: 573 | EEHEE_rd4_0187.pdb |
| SEQ ID NO: 574 | HHH_rd4_0679.pdb |
| SEQ ID NO: 575 | EEHEE_rd4_0271.pdb |
| SEQ ID NO: 576 | EEHEE_rd4_0353.pdb |
| SEQ ID NO: 577 | HHH_rd4_0935.pdb |
| SEQ ID NO: 578 | HHH_rd4_0305.pdb |
| SEQ ID NO: 579 | HHH_rd4_0584.pdb |
| SEQ ID NO: 580 | HHH_rd4_0201.pdb |
| SEQ ID NO: 581 | HHH_rd4_0523.pdb |
| SEQ ID NO: 582 | HHH_rd4_0940.pdb |
| SEQ ID NO: 583 | HHH_rd4_0195.pdb |
| SEQ ID NO: 584 | HHH_rd4_0571.pdb |
| SEQ ID NO: 585 | HHH_rd4_0840.pdb |
| SEQ ID NO: 586 | HHH_rd3_0100.pdb |
| SEQ ID NO: 587 | HHH_rd1_0343.pdb |
| SEQ ID NO: 588 | HHH_rd4_0563.pdb |
| SEQ ID NO: 589 | HHH_rd4_0232.pdb |
| SEQ ID NO: 590 | HHH_rd4_0445.pdb |
| SEQ ID NO: 591 | EHEE_rd4_0243.pdb |
| SEQ ID NO: 592 | HHH_rd4_0176.pdb |
| SEQ ID NO: 593 | HHH_rd4_0397.pdb |
| SEQ ID NO: 594 | EEHEE_rd4_0617.pdb |
| SEQ ID NO: 595 | HHH_rd4_0186.pdb |
| SEQ ID NO: 596 | HHH_rd1_0111.pdb |
| SEQ ID NO: 597 | HHH_rd3_0073.pdb |
| SEQ ID NO: 598 | EEHEE_rd4_0225.pdb |
| SEQ ID NO: 599 | HHH_rd4_0586.pdb |
| SEQ ID NO: 600 | HHH_rd4_0288.pdb |
| SEQ ID NO: 601 | EEHEE_rd4_0514.pdb |
| SEQ ID NO: 602 | EEHEE_rd4_0232.pdb |
| EEG :0 NO: 603 | EHEE_rd2_0096.pdb |
| SEQ ID NO: 604 | HHH_rd4_0349.pdb |
| SEQ ID NO: 605 | HHH_rd4_0036.pdb |
| SEQ ID NO: 606 | HHH_rd1_0220.pdb |
| SEQ ID NO: 607 | HHH_rd4_0009.pdb |
| SEQ ID NO: 608 | EHEE_rd4_0069.pdb |
| SEQ ID NO: 609 | HHH_rd4_0742.pdb |
| SEQ ID NO: 610 | EHEE_rd4_0321.pdb |
| SEQ ID NO: 611 | EEHEE_rd4_0102.pdb |
| SEQ ID NO: 612 | HHH_rd4_0954.pdb |
| SEQ ID NO: 613 | EHEE_rd4_0154.pdb |
| SEQ ID NO: 614 | EEHEE_rd4_0056.pdb |
| SEQ ID NO: 615 | HHH_rd3_0246.pdb |
| SEQ ID NO: 616 | EHEE_rd2_0001.pdb |
| SEQ ID NO: 617 | HHH_rd3_0224.pdb |
| SEQ ID NO: 618 | HHH_rd2_0021.pdb |
| SEQ ID NO: 619 | HHH_rd4_0561.pdb |
| SEQ ID NO: 620 | HHH_rd3_0212.pdb |
| SEQ ID NO: 621 | EEHEE_rd4_0363.pdb |
| SEQ ID NO: 622 | EEHEE_rd4_0152.pcb |
| SEQ ID NO: 623 | EHEE_rd2_0875.pdb |
| SEQ ID NO: 624 | HEEH_rd3_0466.pdb |
| SEQ ID NO: 625 | HHH_rd4_0991.pdb |
| SEQ ID NO: 626 | HHH_rd1_0251.pdb |
| SEQ ID NO: 627 | HHH_rd3_0116.pdb |
| SEQ ID NO: 628 | HHH_rd4_0146.pdb |
| SEQ ID NO: 629 | EHEE_rd4_0646.pdb |
| SEQ ID NO: 630 | HHH_rd3_0034.pdb |
| SEQ ID NO: 631 | EHEE_rd4_0132.pdb |
| SEQ ID NO: 632 | HHH_rd1_0033.pdb |
| SEQ ID NO: 633 | HHH_rd4_0956.pdb |
| SEQ ID NO: 634 | EHEE_rd4_0167.pdb |
| SEQ ID NO: 635 | HHH_rd4_0930.pdb |
| SEQ ID NO: 636 | HHH_rd4_0243.pdb |
| SEQ ID NO: 637 | HHH_rd4_0799.pdb |
| SEQ ID NO: 638 | HHH_rd4_0617.pdb |
| SEQ ID NO: 639 | HHH_rd4_0816.pdb |
| SEQ ID NO: 640 | HHH_rd4_0899.pdb |
| SEQ ID NO: 641 | HHH_rd3_0015.pdb |
| SEQ ID NO: 642 | HHH_rd4_0239.pdb |
| SEQ ID NO: 643 | EEHEE_rd4_0037.pdb |
| SEQ ID NO: 644 | HHH_rd4_0375.pdb |
| SEQ ID NO: 645 | HHH_rd4_0178.pdb |
| SEQ ID NO: 646 | HHH_rd4_0828.pdb |
| SEQ ID NO: 647 | HHH_rd3_0233.pdb |
| SEQ ID NO: 648 | EHEE_rd4_0673.pdb |
| SEQ ID NO: 649 | HHH_rd4_0111.pdb |
| SEQ ID NO: 650 | EEHEE_rd4_0434.pdb |
| SEQ ID NO: 651 | HHH_rd4_0754.pdb |
| SEQ ID NO: 652 | HHH_rd1_0142.pdb |
| SEQ ID NO: 653 | EEHEE_rd4_0198.pdb |
| SEQ ID NO: 654 | HHH_rd4_0238.pdb |
| SEQ ID NO: 655 | HHH_rd4_0046.pdb |
| SEQ ID NO: 656 | EHEE_rd4_0545.pdb |
| SEQ ID NO: 657 | EEHEE_rd4_0365.pdb |
| SEQ ID NO: 658 | EEHEE_rd4_0887.pdb |
| SEQ ID NO: 659 | EEHEE_rd4_0003.pdb |
| SEQ ID NO: 660 | HHH_rd4_0220.pdb |
| SEQ ID NO: 661 | HHH_rd4_0642.pdb |
| SEQ ID NO: 662 | HHH_rd4_0206.pdb |
| SEQ ID NO: 663 | HHH_rd4_0981.pdb |
| SEQ ID NO: 664 | EEHEE_rd4_0018.pdb |
| SEQ ID NO: 665 | HHH_rd4_0714.pdb |
| SEQ ID NO: 666 | HHH_rd4_0424.pdb |
| SEQ ID NO: 667 | HHH_rd4_0918.pdb |
| SEQ ID NO: 668 | HEEH_rd3_0784.pdb |
| SEQ ID NO: 669 | HHH_rd4_0874.pdb |
| SEQ ID NO: 670 | HHH_rd3_0164.pdb |
| SEQ ID NO: 671 | HHH_rd4_0020.pdb |
| SEQ ID NO: 672 | HHH_rd4_0975.pdb |
| SEQ ID NO: 673 | HHH_rd4_0904.pdb |
| SEQ ID NO: 674 | HHH_rd4_0449.pdb |
| SEQ ID NO: 675 | HHH_rd2_0101.pdb |
| SEQ ID NO: 676 | HHH_rd4_0478.pdb |
| SEQ ID NO: 677 | HHH_rd4_0537.pdb |
| SEQ ID NO: 678 | HHH_rd4_0699.pdb |
| SEQ ID NO: 679 | HHH_rd4_0442.pdb |
| SEQ ID NO: 680 | EEHEE_rd4_0031.pdb |
| SEQ ID NO: 681 | HHH_rd4_0420.pdb |
| SEQ ID NO: 682 | EEHEE_rd4_0497.pdb |
| SEQ ID NO: 683 | EEHEE_rd4_0486.pdb |
| SEQ ID NO: 684 | HHH_rd2_0124.pdb |
| SEQ ID NO: 685 | EHEE_rd4_0224.pdb |
| SEQ ID NO: 686 | EEHEE_rd4_0309.pdb |
| SEQ ID NO: 687 | HHH_rd4_0143.pdb |
| SEQ ID NO: 688 | HHH_rd4_0732.pdb |
| SEQ ID NO: 689 | EHEE_rd4_0140.pdb |
| SEQ ID NO: 690 | EEHEE_rd4_0137.pdb |
| SEQ ID NO: 691 | EEHEE_rd4_0285.pdb |
| SEQ ID NO: 692 | HHH_rd2_0018.pdb |
| SEQ ID NO: 693 | EEHEE_rd4_0295.pdb |
| SEQ ID NO: 694 | HHH_rd3_0235d.pdb |
| SEQ ID NO: 695 | HHH_rd1_0606.pdb |
| SEQ ID NO: 696 | EEHEE_rd4_0341.pdb |
| SEQ ID NO: 697 | EEHEE_rd3_0229.pdb |
| SEQ ID NO: 698 | HEEH_rd3_0260.pdb |
| SEQ ID NO: 699 | HHH_rd4_0023.pdb |
| SEQ ID NO: 700 | HHH_rd4_0266.pdb |
| SEQ ID NO: 701 | HHH_rd2_0148.pdb |
| SEQ ID NO: 702 | EHEE_rd1_0284.pdb |
| SEQ ID NO: 703 | EEHEE_rd4_0204.pdb |
| SEQ ID NO: 704 | HHH_rd4_0190.pdb |
| SEQ ID NO: 705 | EHEE_rd4_0290.pdb |
| SEQ ID NO: 706 | EHEE_rd4_0598.pdb |
| SEQ ID NO: 707 | EEHEE_rd4_0998.pdb |
| SEQ ID NO: 708 | EEHEE_rd4_0104.pdb |
| SEQ ID NO: 709 | HHH_rd4_0221.pdb |
| SEQ ID NO: 710 | HHH_rd4_0135.pdb |
| SEQ ID NO: 711 | HHH_rd4_0831.pdb |
| SEQ ID NO: 712 | HHH_rd4_0664.pdb |
| SEQ ID NO: 713 | HHH_rd4_0447.pdb |
| SEQ ID NO: 714 | HHH_rd4_0841.pdb |
| SEQ ID NO: 715 | HHH_rd2_0133.pdb |
| SEQ ID NO: 716 | HHH_rd4_0908.pdb |
| SEQ ID NO: 717 | HHH_rd4_0234.pdb |
| SEQ ID NO: 718 | EHEE_rd4_0677.pdb |
| SEQ ID NO: 719 | EHEE_rd2_0372.pdb |
| SEQ ID NO: 720 | EEHEE_rd4_0098.pdb |
| SEQ ID NO: 721 | EEHEE_rd4_0647.pdb |
| SEQ ID NO: 722 | HHH_rd4_0174.pdb |
| SEQ ID NO: 723 | HHH_rd3_0032.pdb |
| SEQ ID NO: 724 | HHH_rd3_0055.pdb |
| SEQ ID NO: 725 | HEEH_rd3_0103.pdb |
| SEQ ID NO: 726 | HHH_rd4_0476.pdb |
| SEQ ID NO: 727 | HHH_rd4_0422.pdb |
| SEQ ID NO: 728 | EHEE_rd2_0082.pdb |
| SEQ ID NO: 729 | EHEE_rd3_0003.pdb |
| SEQ ID NO: 730 | HHH_rd1_0590.pdb |
| SEQ ID NO: 731 | HHH_rd3_0049.pdb |
| SEQ ID NO: 732 | HHH_rd4_0165.pdb |
| SEQ ID NO: 733 | HHH_rd4_0117.pdb |
| SEQ ID NO: 734 | HHH_rd4_0736.pdb |
| SEQ ID NO: 735 | EHEE_rd3_0016.pdb |
| SEQ ID NO: 736 | EEHE_rd3_0395.pdb |
| SEQ ID NO: 737 | HHH_rd1_0439.pdb |
| SEQ ID NO: 738 | EEHEE_rd4_0189.pdb |
| SEQ ID NO: 739 | EEHEE_rd4_0553.pdb |
| SEQ ID NO: 740 | EEHEE_rd3_1584.pdb |
| SEQ ID NO: 741 | HHH_rd1_0622.pdb |
| SEQ ID NO: 742 | HHH_rd4_0481.pdb |
| SEQ ID NO: 743 | EHEE_rd4_0448.pdb |
| SEQ ID NO: 744 | HHH_rd3_0026.pdb |
| SEQ ID NO: 745 | HHH_rd4_0230.pdb |
| SEQ ID NO: 746 | HHH_rd4_0401.pdb |
| SEQ ID NO: 747 | HHH_rd4_0880.pdb |
| SEQ ID NO: 748 | HHH_rd4_0692.pdb |
| SEQ ID NO: 749 | EEHEE_rd4_0049.pdb |
| SEQ ID NO: 750 | EEHEE_rd4_0490.pdb |
| SEQ ID NO: 751 | EEHEE_rd4_0093.pdb |
| SEQ ID NO: 752 | HHH_rd4_0444.pdb |
| SEQ ID NO: 753 | HHH_rd4_0739.pdb |
| SEQ ID NO: 754 | HHH_rd3_0017.pdb |
| SEQ ID NO: 755 | HHH_rd1_0233.pdb |
| SEQ ID NO: 756 | EHEE_rd4_0356.pdb |
| SEQ ID NO: 757 | EEHEE_rd4_0448.pdb |
| SEQ ID NO: 758 | HHH_rd3_0068.pdb |
| SEQ ID NO: 759 | HHH_rd4_0298.pdb |
| SEQ ID NO: 760 | HHH_rd4_0941.pdb |
| SEQ ID NO: 761 | HHH_rd4_0982.pdb |
| SEQ ID NO: 762 | HHH_rd4_0147.pdb |
| SEQ ID NO: 763 | HHH_rd4_0529.pdb |
| SEQ ID NO: 764 | HHH_rd4_0538.pdb |
| SEQ ID NO: 765 | HHH_rd3_0124.pdb |
| SEQ ID NO: 766 | HHH_rd2_0056.pdb |
| SEQ ID NO: 767 | EEHEE_rd4_0394.pdb |
| SEQ ID NO: 768 | HHH_rd4_0638.pdb |
| SEQ ID NO: 769 | HHH_rd3_0072.pdb |
| SEQ ID NO: 770 | HHH_rd4_0660.pdb |
| SEQ ID NO: 771 | HHH_rd3_0148.pdb |
| SEQ ID NO: 772 | HHH_rd4_0694.pdb |
| SEQ ID NO: 773 | EEHEE_rd4_0857.pdb |
| SEQ ID NO: 774 | HHH_rd3_0035.pdb |
| SEQ ID NO: 775 | EEHEE_rd3_1692.pdb |
| SEQ ID NO: 776 | HHH_rd4_0299.pdb |
| SEQ ID NO: 777 | HHH_rd1_0756.pdb |
| SEQ ID NO: 778 | HHH_rd3_0201.pdb |
| SEQ ID NO: 779 | HHH_rd3_0194.pdb |
| SEQ ID NO: 780 | HHH_rd4_0158.pdb |
| SEQ ID NO: 781 | HHH_rd4_0250.pdb |
| SEQ ID NO: 782 | HHH_rd4_0082.pdb |
| SEQ ID NO: 783 | HHH_rd4_0406.pdb |
| SEQ ID NO: 784 | EHEE_rd4_0860.pdb |
| SEQ ID NO: 785 | HHH_rd2_0141.pdb |
| SEQ ID NO: 786 | HHH_rd4_0233.pdb |
| SEQ ID NO: 787 | EEHEE_rd4_0373.pdb |
| SEQ ID NO: 788 | EEHEE_rd4_0075.pdb |
| SEQ ID NO: 789 | EHEE_rd4_0028.pdb |
| SEQ ID NO: 790 | EHEE_rd4_0007.pdb |
| SEQ ID NO: 791 | EEHEE_rd4_0067.pdb |
| SEQ ID NO: 792 | HHH_rd4_0362.pdb |
| SEQ ID NO: 793 | HHH_rd4_0387.pdb |
| SEQ ID NO: 794 | HHH_rd1_0801.pdb |
| SEQ ID NO: 795 | HHH_rd3_0185.pdb |
| SEQ ID NO: 796 | HHH_rd4_0570.pdb |
| SEQ ID NO: 797 | HHH_rd1_0376.pdb |
| SEQ ID NO: 798 | EEHEE_rd4_0829.pdb |
| SEQ ID NO: 799 | EEHEE_rd3_0765.pdb |
| SEQ ID NO: 800 | HHH_rd4_0980.pdb |
| SEQ ID NO: 801 | HHH_rd4_0485.pdb |
| SEQ ID NO: 802 | HHH_rd4_0479.pdb |
| SEQ ID NO: 803 | HHH_rd1_0197.pdb |
| SEQ ID NO: 804 | HEEH_rd3_1024.pdb |
| SEQ ID NO: 805 | HHH_rd4_0921.pdb |
| SEQ ID NO: 806 | EHEE_rd4_0283.pdb |
| SEQ ID NO: 807 | HHH_rd4_0192.pdb |
| SEQ ID NO: 808 | HHH_rd4_0217.pdb |
| SEQ ID NO: 809 | HHH_rd4_0016.pdb |
| SEQ ID NO: 810 | HHH_rd4_0826.pdb |
| SEQ ID NO: 811 | EHEE_rd4_0285.pdb |
| SEQ ID NO: 812 | HHH_rd4_0488.pdb |
| SEQ ID NO: 813 | HHH_rd1_0286.pdb |
| SEQ ID NO: 814 | HHH_rd3_0198.pdb |
| SEQ ID NO: 815 | HHH_rd4_0367.pdb |
| SEQ ID NO: 816 | HHH_rd4_0769.pdb |
| SEQ ID NO: 817 | EHEE_rd4_0739.pdb |
| SEQ ID NO: 818 | EHEE_rd4_0252.pdb |
| SEQ ID NO: 819 | EHEE_rd2_0309.pdb |
| SEQ ID NO: 820 | EHEE_rd4_0246.pdb |
| SEQ ID NO: 821 | HHH_rd4_0157.pdb |
| SEQ ID NO: 822 | EHEE_rd4_0280.pdb |
| SEQ ID NO: 823 | HHH_rd2_0002.pdb |
| SEQ ID NO: 824 | HHH_rd1_0855.pdb |
| SEQ ID NO: 825 | EHEE_rd4_0042.pdb |
| SEQ ID NO: 826 | EEHEE_rd4_0156.pdb |
| SEQ ID NO: 827 | EHEE_rd4_0044.pdb |
| SEQ ID NO: 828 | HHH_rd4_0524.pdb |
| SEQ ID NO: 829 | EEHEE_rd4_0626.pdb |
| SEQ ID NO: 830 | EHEE_rd4_0003.pdb |
| SEQ ID NO: 831 | EEHEE_rd4_0349.pdb |
| SEQ ID NO: 832 | HHH_rd4_0885.pdb |
| SEQ ID NO: 833 | HHH_rd4_0247.pdb |
| SEQ ID NO: 834 | EEHEE_rd4_0459.pdb |
| SEQ ID NO: 835 | HHH_rd4_0074.pdb |
| SEQ ID NO: 836 | HHH_rd4_0060.pdb |
| SEQ ID NO: 837 | EHEE_rd4_0071.pdb |
| SEQ ID NO: 838 | HHH_rd4_0460.pdb |
| SEQ ID NO: 839 | HHH_rd4_0170.pdb |
| SEQ ID NO: 840 | HHH_rd4_0425.pdb |
| SEQ ID NO: 841 | EEHEE_rd4_0376.pdb |
| SEQ ID NO: 842 | HHH_rd4_0417.pdb |
| SEQ ID NO: 843 | HHH_rd4_0557.pdb |
| SEQ ID NO: 844 | EEHEE_rd4_0042.pdb |
| SEQ ID NO: 845 | HHH_rd4_0494.pdb |
| SEQ ID NO: 846 | EEHEE_rd3_0343.pdb |
| SEQ ID NO: 847 | HHH_rd4_0121.pdb |
| SEQ ID NO: 848 | EEHEE_rd4_0223.pdb |
| SEQ ID NO: 849 | HHH_rd3_0188.pdb |
| SEQ ID NO: 850 | HHH_rd4_0548.pdb |
| SEQ ID NO: 851 | EHEE_rd4_0463.pdb |
| SEQ ID NO: 852 | EEHEE_rd4_0013.pdb |
| SEQ ID NO: 853 | HHH_rd4_0378.pdb |
| SEQ ID NO: 854 | HHH_rd4_0127.pdb |
| SEQ ID NO: 855 | HHH_rd3_0121.pdb |
| SEQ ID NO: 856 | HHH_rd4_0183.pdb |
| SEQ ID NO: 857 | HHH_rd4_0766.pdb |
| SEQ ID NO: 858 | EHEE_rd4_0253.pdb |
| SEQ ID NO: 859 | HHH_rd4_0345.pdb |
| SEQ ID NO: 860 | EEHEE_rd3_0083.pdb |
| SEQ ID NO: 861 | EHEE_rd4_0068.pdb |
| SEQ ID NO: 862 | HHH_rd4_0018.pdb |
| SEQ ID NO: 863 | HHH_rd3_0161.pdb |
| SEQ ID NO: 864 | HHH_rd4_0690.pdb |
| SEQ ID NO: 865 | HHH_rd4_0090.pdb |
| SEQ ID NO: 866 | EEHEE_rd4_0116.pdb |
| SEQ ID NO: 867 | HHH_rd4_0597.pdb |
| SEQ ID NO: 868 | HHH_rd2_0071.pdb |
| SEQ ID NO: 869 | HHH_rd4_0917.pdb |
| SEQ ID NO: 870 | EHEE_rd4_0398.pdb |
| SEQ ID NO: 871 | EHEE_rd4_0651.pdb |
| SEQ ID NO: 872 | EEHEE_rd3_1466.pdb |
| SEQ ID NO: 873 | HHH_rd4_0686.pdb |
| SEQ ID NO: 874 | EHEE_rd3_0224.pdb |
| SEQ ID NO: 875 | HHH_rd1_0630.pdb |
| SEQ ID NO: 876 | HHH_rd3_0142.pdb |
| SEQ ID NO: 877 | EHEE_rd4_0023.pdb |
| SEQ ID NO: 878 | EEHEE_rd4_0126.pdb |
| SEQ ID NO: 879 | HHH_rd2_0163.pdb |
| SEQ ID NO: 880 | EEHEE_rd4_0763.pdb |
| SEQ ID NO: 881 | HHH_rd2_0215.pdb |
| SEQ ID NO: 882 | HHH_rd4_0850.pdb |
| SEQ ID NO: 883 | EHEE_rd4_0036.pdb |
| SEQ ID NO: 884 | EEHEE_rd4_0146.pdb |
| SEQ ID NO: 885 | HHH_rd4_0603.pdb |
| SEQ ID NO: 886 | EHEE_rd4_0361.pdb |
| SEQ ID NO: 887 | HHH_rd4_0610.pdb |
| SEQ ID NO: 888 | HHH_rd4_0574.pdb |
| SEQ ID NO: 889 | HHH_rd4_0707.pdb |
| SEQ ID NO: 890 | EEHEE_rd4_0021.pdb |
| SEQ ID NO: 891 | EEHEE_rd4_0407.pdb |
| SEQ ID NO: 892 | HHH_rd4_0472.pdb |
| SEQ ID NO: 893 | HHH_rd3_0021.pdb |
| SEQ ID NO: 894 | EEHEE_rd4_0899.pdb |
| SEQ ID NO: 895 | EEHEE_rd4_0008.pdb |
| SEQ ID NO: 896 | EHEE_rd1_0882.pdb |
| SEQ ID NO: 897 | HHH_rd4_0756.pdb |
| SEQ ID NO: 898 | EHEE_rd2_0341.pdb |
| SEQ ID NO: 899 | HHH_rd4_0809.pdb |
| SEQ ID NO: 900 | HHH_rd4_0006.pdb |
| SEQ ID NO: 901 | HHH_rd4_0210.pdb |
| SEQ ID NO: 902 | HHH_rd4_0133.pdb |
| SEQ ID NO: 903 | EHEE_rd3_0064.pdb |
| SEQ ID NO: 904 | HHH_rd1_0021.pdb |
| SEQ ID NO: 905 | HHH_rd3_0095.pdb |
| SEQ ID NO: 906 | HHH_rd1_0190.pdb |
| SEQ ID NO: 907 | EHEE_rd4_0045.pdb |
| SEQ ID NO: 908 | EEHEE_rd4_0132.pdb |
| SEQ ID NO: 909 | HHH_rd4_0129.pdb |
| SEQ ID NO: 910 | EHEE_rd3_0195.pdb |
| SEQ ID NO: 911 | HHH_rd1_0787.pdb |
| SEQ ID NO: 912 | HHH_rd4_0264.pdb |
| SEQ ID NO: 913 | HHH_rd1_0289.pdb |
| SEQ ID NO: 914 | HHH_rd4_0153.pdb |
| SEQ ID NO: 915 | EEHEE_rd4_0328.pdb |
| SEQ ID NO: 916 | EEHEE_rd4_0391.pdb |
| SEQ ID NO: 917 | HHH_rd4_0893.pdb |
| SEQ ID NO: 918 | HHH_rd4_0805.pdb |
| SEQ ID NO: 919 | EHEE_rd4_0938.pdb |
| SEQ ID NO: 920 | HHH_rd4_0966.pdb |
| SEQ ID NO: 921 | EHEE_rd4_0586.pdb |
| SEQ ID NO: 922 | HHH_rd2_0214.pdb |
| SEQ ID NO: 923 | EEHEE_rd4_0268.pdb |
| SEQ ID NO: 924 | HHH_rd4_0576.pdb |
| SEQ ID NO: 925 | HHH_rd4_0309.pdb |
| SEQ ID NO: 926 | EHEE_rd4_0320.pdb |
| SEQ ID NO: 927 | HHH_rd4_0835.pdb |
| SEQ ID NO: 928 | HHH_rd4_0166.pdb |
| SEQ ID NO: 929 | HHH_rd2_0007.pdb |
| SEQ ID NO: 930 | HHH_rd4_0848.pdb |
| SEQ ID NO: 931 | EEHEE_rd4_0754.pdb |
| SEQ ID NO: 932 | EHEE_rd4_0333.pdb |
| SEQ ID NO: 933 | EEHEE_rd4_0519.pdb |
| SEQ ID NO: 934 | HHH_rd4_0486.pdb |
| SEQ ID NO: 935 | HHH_rd2_0173.pdb |
| SEQ ID NO: 936 | EEHEE_rd4_0181.pdb |
| SEQ ID NO: 937 | EEHEE_rd4_0294.pdb |
| SEQ ID NO: 938 | EEHEE_rd4_0140.pdb |
| SEQ ID NO: 939 | EHEE_rd4_0628.pdb |
| SEQ ID NO: 940 | EEHEE_rd4_0016.pdb |
| SEQ ID NO: 941 | EHEE_rd4_0349 pdb |
| SEQ ID NO: 942 | HHH_rd4_0857.pdb |
| SEQ ID NO: 943 | HHH_rd4_0671.pdb |
| SEQ ID NO: 944 | HHH_rd4_0626.pdb |
| SEQ ID NO: 945 | HHH_rd2_0203.pdb |
| SEQ ID NO: 946 | EEHEE_rd3_0468.pdb |
| SEQ ID NO: 947 | HHH_rd4_0377.pdb |
| SEQ ID NO: 948 | HHH_rd4_0759.pdb |
| SEQ ID NO: 949 | HHH_rd4_0710.pdb |
| SEQ ID NO: 950 | HHH_rd4_0453.pdb |
| SEQ ID NO: 951 | HHH_rd4_0436.pdb |
| SEQ ID NO: 952 | HHH_rd4_0354.pdb |
| SEQ ID NO: 953 | HHH_rd4_0564.pdb |
| SEQ ID NO: 954 | EHEE_rd4_0149.pdb |
| SEQ ID NO: 955 | EHEE_rd3_0148.pdb |
| SEQ ID NO: 956 | HHH_rd4_0708.pdb |
| SEQ ID NO: 957 | EEHEE_rd4_0020.pdb |
| SEQ ID NO: 958 | EEHEE_rd4_0020.pdb |
| SEQ ID NO: 959 | EEHEE_rd4_0176.pdb |
| SEQ ID NO: 960 | HHH_rd4_0045.pdb |
| SEQ ID NO: 961 | HHH_rd4_0010.pdb |
| SEQ ID NO: 962 | EEHEE_rd4_0066.pdb |
| SEQ ID NO: 963 | EHEE_rd4_0383.pdb |
| SEQ ID NO: 964 | EEHEE_rd4_0329.pdb |
| SEQ ID NO: 965 | HHH_rd2_0134.pdb |
| SEQ ID NO: 966 | EEHEE_rd4_0226.pdb |
| SEQ ID NO: 967 | HHH_rd4_0172.pdb |
| SEQ ID NO: 968 | HHH_rd4_0878.pdb |
| SEQ ID NO: 969 | HHH_rd4_0123.pdb |
| SEQ ID NO: 970 | HHH_rd4_0187.pdb |
| SEQ ID NO: 971 | EHEE_rd4_0518.pdb |
| SEQ ID NO: 972 | HHH_rd4_0271.pdb |
| SEQ ID NO: 973 | EEHEE_rd4_0797.pdb |
| SEQ ID NO: 974 | EHEE_rd4_0731.pdb |
| SEQ ID NO: 975 | HHH_rd4_0947.pdb |
| SEQ ID NO: 976 | EHEE_rd3_0066.pdb |
| SEQ ID NO: 977 | HHH_rd1_0044.pdb |
| SEQ ID NO: 978 | HHH_rd4_0208.pdb |
| SEQ ID NO: 979 | EEHEE_rd3_1265.pdb |
| SEQ ID NO: 980 | EEHEE_rd4_0250.pdb |
| SEQ ID NO: 981 | EHEE_rd4_0294.pdb |
| SEQ ID NO: 982 | HHH_rd4_0696.pdb |
| SEQ ID NO: 983 | EHEE_rd4_0194.pdb |
| SEQ ID NO: 984 | EHEE_rd2_0981.pdb |
| SEQ ID NO: 985 | HHH_rd1_0353.pdb |
| SEQ ID NO: 986 | HHH_rd3_0197.pdb |
| SEQ ID NO: 987 | EEHEE_rd4_0598.pdb |
| SEQ ID NO: 988 | EEHEE_rd4_0563.pdb |
| SEQ ID NO: 989 | EEHEE_rd3_0170.pdb |
| SEQ ID NO: 990 | HHH_rd4_0328.pdb |
| SEQ ID NO: 991 | EHEE_rd4_0968.pdb |
| SEQ ID NO: 992 | EEHEE_rd4_0595.pdb |
| SEQ ID NO: 993 | HHH_rd4_0923.pdb |
| SEQ ID NO: 994 | EHEE_rd4_0090.pdb |
| SEQ ID NO: 995 | HHH_rd2_0080.pdb |
| SEQ ID NO: 996 | EEHEE_rd4_0027.pdb |
| SEQ ID NO: 997 | HEEH_rd3_1273.pdb |
| SEQ ID NO: 998 | EHEE_rd4_0996.pdb |
| SEQ ID NO: 999 | EEHEE_rd4_0640.pdb |
| SEQ ID NO: 1000 | EEHEE_rd4_0077.pdb |
| SEQ ID NO: 1001 | HHH_rd4_0861.pdb |
| SEQ ID NO: 1002 | EEHEE_rd4_0272.pdb |
| SEQ ID NO: 1003 | EEHEE_rd4_0957.pdb |
| SEQ ID NO: 1004 | HHH_rd3_0083.pdb |
| SEQ ID NO: 1005 | EEHEE_rd4_0358.pdb |
| SEQ ID NO: 1006 | EHEE_rd4_0436.pdb |
| SEQ ID NO: 1007 | EEHEE_rd4_0772.pdb |
| SEQ ID NO: 1008 | EHEE_rd4_0539.pdb |
| SEQ ID NO: 1009 | HHH_rd4_0595.pdb |
| SEQ ID NO: 1010 | HHH_rd1_0470.pdb |
| SEQ ID NO: 1011 | HHH_rd4_0582.pdb |
| SEQ ID NO: 1012 | EHEE_rd2_0861.pdb |
| SEQ ID NO: 1013 | HHH_rd4_0164.pdb |
| SEQ ID NO: 1014 | EEHEE_rd4_0475.pdb |
| SEQ ID NO: 1015 | HHH_rd4_0883.pdb |
| SEQ ID NO: 1016 | HHH_rd4_0323.pdb |
| SEQ ID NO: 1017 | HHH_rd4_0637.pdb |
| SEQ ID NO: 1018 | HHH_rd2_0199.pdb |
| SEQ ID NO: 1019 | HHH_rd4_0341.pdb |
| SEQ ID NO: 1020 | HHH_rd3_0176.pdb |
| SEQ ID NO: 1021 | HHH_rd3_0225.pdb |
| SEQ ID NO: 1022 | EHEE_rd4_0111.pdb |
| SEQ ID NO: 1023 | HHH_rd4_0275.pdb |
| SEQ ID NO: 1024 | HHH_rd3_0183.ptfb |
| SEQ ID NO: 1025 | HHH_rd4_0958.pdb |
| SEQ ID NO: 1026 | EHEE_rd4_0573.pdb |
| SEQ ID NO: 1027 | HHH_rd1_0843.pdb |
| SEQ ID NO: 1028 | EHEE_rd3_0093.pdb |
| SEQ ID NO: 1029 | HHH_rd4_0990.pdb |
| SEQ ID NO: 1030 | EHEE_rd2_0235.pdb |
| SEQ ID NO: 1031 | EEHEE_rd4_0107.pdb |
| SEQ ID NO: 1032 | EEHEE_rd3_1372.pdb |
| SEQ ID NO: 1033 | EHEE_rd4_0909.pdb |
| SEQ ID NO: 1034 | EEHEE_rd4_0194.pdb |
| SEQ ID NO: 1035 | HHH_rd4_0525.pdb |
| SEQ ID NO: 1036 | EHEE_rd4_0371.pdb |
| SEQ ID NO: 1037 | EEHEE_rd4_0030.pdb |
| SEQ ID NO: 1038 | HHH_rd4_0939.pdb |
| SEQ ID NO: 1039 | HEEH_rd3_0223.pdb |
| SEQ ID NO: 1040 | HHH_rd4_0901.pdb |
| SEQ ID NO: 1041 | HHH_rd4_0774.pdb |
| SEQ ID NO: 1042 | HHH_rd4_0431.pdb |
| SEQ ID NO: 1043 | HHH_rd2_0222.pdb |
| SEQ ID NO: 1044 | HHH_rd1_0369 pdb |
| SEQ ID NO: 1045 | HHH_rd3_0023.pdb |
| SEQ ID NO: 1046 | HHH_rd3_0206.pdb |
| SEQ ID NO: 1047 | EHEE_rd4_0758.pdb |
| SEQ ID NO: 1048 | HHH_rd4_0648.pdb |
| SEQ ID NO: 1049 | HHH_rd4_0301.pdb |
| SEQ ID NO: 1050 | EEHEE_rd4_0500.pdb |
| SEQ ID NO: 1051 | EHEE_rd4_0340.pdb |
| SEQ ID NO: 1052 | HHH_rd4_0765.pdb |
| SEQ ID NO: 1053 | EEHEE_rd4_0970.pdb |
| SEQ ID NO: 1054 | HHH_rd3_0210.pdb |
| SEQ ID NO: 1055 | EHEE_rd4_0040.pdb |
| SEQ ID NO: 1056 | HHH_rd4_0502.pdb |
| SEQ ID NO: 1057 | HHH_rd4_0873.pdb |
| SEQ ID NO: 1058 | EHEE_rd4_0458.pdb |
| SEQ ID NO: 1059 | EEHEE_rd4_0334.pdb |
| SEQ ID NO: 1060 | HHH_rd2_0145.pdb |
| SEQ ID NO: 1061 | HHH_rd4_0331.pdb |
| SEQ ID NO: 1062 | HHH_rd4_0393.pdb |
| SEQ ID NO: 1063 | HHH_rd4_0324.pdb |
| SEQ ID NO: 1064 | EEHEE_rd4_0106.pdb |
| SEQ ID NO: 1065 | HHH_rd1_0871.pdb |
| SEQ ID NO: 1066 | EEHEE_rd3_1810.pdb |
| SEQ ID NO: 1067 | HHH_rd4_0281.pdb |
| SEQ ID NO: 1068 | EEHEE_rd4_0989.pdb |
| SEQ ID NO: 1069 | HHH_rd4_0630.pdb |
| SEQ ID NO: 1070 | EEHEE_rd4_0012.pdb |
| SEQ ID NO: 1071 | HHH_rd3_0223.pdb |
| SEQ ID NO: 1072 | HHH_rd2_0225.pdb |
| SEQ ID NO: 1073 | HHH_rd4_0465.pdb |
| SEQ ID NO: 1074 | EEHEE_rd4_0281.pdb |
| SEQ ID NO: 1075 | HHH_rd4_0180.pdb |
| SEQ ID NO: 1076 | HHH_rd4_0019.pdb |
| SEQ ID NO: 1077 | HHH_rd4_0813.pdb |
| SEQ ID NO: 1078 | EEHEE_rd4_0862.pdb |
| SEQ ID NO: 1079 | EEHEE_rd3_1716.pdb |
| SEQ ID NO: 1080 | EHEE_rd4_0288.pdb |
| SEQ ID NO: 1081 | HHH_rd4_0987.pdb |
| SEQ ID NO: 1082 | HHH_rd4_0191.pdb |
| SEQ ID NO: 1083 | EEHEE_rd4_0017.pdb |
| SEQ ID NO: 1084 | HHH_rd4_0185.pdb |
| SEQ ID NO: 1085 | HHH_rd4_0685.pdb |
| SEQ ID NO: 1086 | HHH_rd4_0070.pdb |
| SEQ ID NO: 1087 | HHH_rd4_0099.pdb |
| SEQ ID NO: 1088 | EEHEE_rd4_0302.pdb |
| SEQ ID NO: 1089 | HHH_rd2_0206.pdb |
| SEQ ID NO: 1090 | EEHEE_rd4_0184.pdb |
| SEQ ID NO: 1091 | EHEE_rd4_0250.pdb |
| SEQ ID NO: 1092 | EHEE_rd4_0139.pdb |
| SEQ ID NO: 1093 | HHH_rd4_0083.pdb |
| SEQ ID NO: 1094 | HHH_rd4_0131.pdb |
| SEQ ID NO: 1095 | EHEE_rd2_0273.pdb |
| SEQ ID NO: 1096 | EEHEE_rd3_0648.pdb |
| SEQ ID NO: 1097 | EHEE_rd4_0686.pdb |
| SEQ ID NO: 1098 | EEHEE_rd4_0142.pdb |
| SEQ ID NO: 1099 | EEHEE_rd4_0458.pdb |
| SEQ ID NO: 1100 | EEHEE_rd4_0121.pdb |
| SEQ ID NO: 1101 | HHH_rd4_0651.pdb |
| SEQ ID NO: 1102 | HHH_rd2_0153.pdb |
| SEQ ID NO: 1103 | EEHEE_rd4_0356.pdb |
| SEQ ID NO: 1104 | EEHEE_rd4_0115.pdb |
| SEQ ID NO: 1105 | HHH_rd2_0017.pdb |
| SEQ ID NO: 1106 | HHH_rd4_0907.pdb |
| SEQ ID NO: 1107 | EHEE_rd4_0155.pdb |
| SEQ ID NO: 1108 | HHH_rd3_0127.pdb |
| SEQ ID NO: 1109 | EHEE_rd4_0976.pdb |
| SEQ ID NO: 1110 | HHH_rd4_0219.pdb |
| SEQ ID NO: 1111 | HEEH_rd3_0736.pdb |
| SEQ ID NO: 1112 | HHH_rd4_0398.pdb |
| SEQ ID NO: 1113 | HHH_rd4_0339.pdb |
| SEQ ID NO: 1114 | HHH_rd4_0695.pdb |
| SEQ ID NO: 1115 | HHH_rd3_0086.pdb |
| SEQ ID NO: 1116 | EEHEE_rd4_0212.pdb |
| SEQ ID NO: 1117 | EEHEE_rd4_0255.pdb |
| SEQ ID NO: 1118 | EEHEE_rd4_0525.pdb |
| SEQ ID NO: 1119 | HHH_rd4_0108.pdb |
| SEQ ID NO: 1120 | HHH_rd3_0053.pdb |
| SEQ ID NO: 1121 | HHH_rd4_0792.pdb |
| SEQ ID NO: 1122 | EEHEE_rd4_0009.pdb |
| SEQ ID NO: 1123 | HHH_rd4_0394.pdb |
| SEQ ID NO: 1124 | EEHEE_rd4_0476.pdb |
| SEQ ID NO: 1125 | EHEE_rd2_0271.pdb |
| SEQ ID NO: 1126 | HHH_rd4_0267.pdb |
| SEQ ID NO: 1127 | HHH_rd3_0106.pdb |
| SEQ ID NO: 1128 | EEHEE_rd4_0141.pdb |
| SEQ ID NO: 1129 | EHEE_rd4_0187.pdb |
| SEQ ID NO: 1130 | EEHEE_rd3_1367.pdb |
| SEQ ID NO: 1131 | HHH_rd1_0026.pdb |
| SEQ ID NO: 1132 | EHEE_rd3_0029.pdb |
| SEQ ID NO: 1133 | HHH_rd4_0970.pdb |
| SEQ ID NO: 1134 | HHH_rd4_0615 pdb |
| SEQ ID NO: 1135 | HHH_rd4_0585.pdb |
| SEQ ID NO: 1136 | EEHEE_rd3_1079.pdb |
| SEQ ID NO: 1137 | EHEE_rd2_0475.pdb |
| SEQ ID NO: 1138 | HHH_rd4_0489.pdb |
| SEQ ID NO: 1139 | EEHEE_rd4_0065.pdb |
| SEQ ID NO: 1140 | EHEE_rd4_0033.pdb |
| SEQ ID NO: 1141 | HHH_rd4_0065.pdb |
| SEQ ID NO: 1142 | HEEH_rd4_0053.pdb |
| SEQ ID NO: 1143 | EEHEE_rd4.0249.pdb |
| SEQ ID NO: 1144 | EEHEE_rd4_0535.pdb |
| SEQ ID NO: 1145 | HHH_rd4_0091.pdb |
| SEQ ID NO: 1146 | EEHEE_rd4_0154.pdb |
| SEQ ID NO: 1147 | HHH_rd4_0415.pdb |
| SEQ ID NO: 1148 | EEHEE_rd3_1669.pdb |
| SEQ ID NO: 1149 | EHEE_rd4_0097.pdb |
| SEQ ID NO: 1150 | EEHEE_rd4_0417.pdb |
| SEQ ID NO: 1151 | EEHEE_rd4_0439.pdb |
| SEQ ID NO: 1152 | EEHEE_rd3_0988.pdb |
| SEQ ID NO: 1153 | EEHEE_rd4_0149.pdb |
| SEQ ID NO: 1154 | HHH_rd3_0117.pdb |
| SEQ ID NO: 1155 | HHH_rd4_0939.pdb |
| SEQ ID NO: 1156 | EEHEE_rd4_0586.pdb |
| SEQ ID NO: 1157 | EEHEE_rd3_1790.pdb |
| SEQ ID NO: 1158 | HHH_rd4_0771.pdb |
| SEQ ID NO: 1159 | HHH_rd1_0850.pdb |
| SEQ ID NO: 1160 | HHH_rd2_0241.pdb |
| SEQ ID NO: 1161 | EEHEE_rd4_0631.pdb |
| SEQ ID NO: 1162 | HHH_rd4_0024.pdb |
| SEQ ID NO: 1163 | EEHEE_rd4_0891.pdb |
| SEQ ID NO: 1164 | EHEE_rd4_0073.pdb |
| SEQ ID NO: 1165 | HEEH_rd3_1054.pdb |
| SEQ ID NO: 1166 | EHEE_rd2_0190.pdb |
| SEQ ID NO: 1167 | HHH_rd3_0056.pdb |
| SEQ ID NO: 1168 | EEHEE_rd4_0157.pdb |
| SEQ ID NO: 1169 | EEHEE_rd3_1627.pdb |
| SEQ ID NO: 1170 | EEHEE_rd4_0163.pdb |
| SEQ ID NO: 1171 | HHH_rd1_0608.pdb |
| SEQ ID NO: 1172 | EHEE_rd4_0244.pdb |
| SEQ ID NO: 1173 | HHH_rd1_0426.pdb |
| SEQ ID NO: 1174 | EEHEE_rd4_0581.pdb |
| SEQ ID NO: 1175 | EEHEE_rd3_1353.pdb |
| SEQ ID NO: 1176 | EHEE_rd4_0172.pdb |
| SEQ ID NO: 1177 | EHEE_rd4_0372.pdb |
| SEQ ID NO: 1178 | EHEE_rd4_0086.pdb |
| SEQ ID NO: 1179 | HHH_rd4_0653.pdb |
| SEQ ID NO: 1180 | EEHEE_rd4_0010.pdb |
| SEQ ID NO: 1181 | HHH_rd4_0533.pdb |
| SEQ ID NO: 1182 | EEHEE_rd3_1483.pdb |
| SEQ ID NO: 1183 | HHH_rd4_0193.pdb |
| SEQ ID NO: 1184 | HHH_rd4_0999.pdb |
| SEQ ID NO: 1185 | HHH_rd4_0418.pdb |
| SEQ ID NO: 1186 | HHH_rd4_0872.pdb |
| SEQ ID NO: 1187 | EEHEE_rd3_0623.pdb |
| SEQ ID NO: 1188 | HHH_rd4_0931.pdb |
| SEQ ID NO: 1189 | EEHEE_rd4_0639.pdb |
| SEQ ID NO: 1190 | EEHEE_rd4_0451.pdb |
| SEQ ID NO: 1191 | HHH_rd4_0729.pdb |
| SEQ ID NO: 1192 | EEHEE_rd4_0283.pdb |
| SEQ ID NO: 1193 | EEHEE_rd3_0655.pdb |
| SEQ ID NO: 1194 | HHH_rd3_0203.pdb |
| SEQ ID NO: 1195 | HHH_rd4_0242.pdb |
| SEQ ID NO: 1196 | EHEE_rd4_0544.pdb |
| SEQ ID NO: 1197 | HHH_rd3_0062.pdb |
| SEQ ID NO: 1198 | EEHEE_rd4_0055.pdb |
| SEQ ID NO: 1199 | HHH_rd3_0093.pdb |
| SEQ ID NO: 1200 | HHH_rd3_0181.pdb |
| SEQ ID NO: 1201 | HEEH_rd3_0055.pdb |
| SEQ ID NO: 1202 | HHH_rd4_0471.pdb |
| SEQ ID NO: 1203 | HHH_rd1_0258.pdb |
| SEQ ID NO: 1204 | EEHEE_rd4_0084.pdb |
| SEQ ID NO: 1205 | HHH_rd1_0025.pdb |
| SEQ ID NO: 1206 | HHH_rd4_0069.pdb |
| SEQ ID NO: 1207 | HHH_rd4_0862.pdb |
| SEQ ID NO: 1208 | HHH_rd1_0249.pdb |
| SEQ ID NO: 1209 | EHEE_rd4_0392.pdb |
| SEQ ID NO: 1210 | EEHEE_rd4_0123.pdb |
| SEQ ID NO: 1211 | EHEE_rd4_0756.pdb |
| SEQ ID NO: 1212 | EEHEE_rd4_0039.pdb |
| SEQ ID NO: 1213 | HHH_rd4_0655.pdb |
| SEQ ID NO: 1214 | HHH_rd4_0113.pdb |
| SEQ ID NO: 1215 | HHH_rd1_0057.pdb |
| SEQ ID NO: 1216 | HHH_rd4_0263.pdb |
| SEQ ID NO: 1217 | HHH_rd4_0245.pdb |
| SEQ ID NO: 1218 | EHEE_rd4_0605.pdb |
| SEQ ID NO: 1219 | EEHEE_rd4_0537.pdb |
| SEQ ID NO: 1220 | HHH_rd4_0572.pdb |
| SEQ ID NO: 1221 | HHH_rd2_0250.pdb |
| SEQ ID NO: 1222 | EEHEE_rd4_0499.pdb |
| SEQ ID NO: 1223 | HHH_rd3_0129.pdb |
| SEQ ID NO: 1224 | EEHEE_rd4_0886.pdb |
| SEQ ID NO: 1225 | HHH_rd4_0936.pdb |
| SEQ ID NO: 1226 | EEHEE_rd4_0290.pdb |
| SEQ ID NO: 1227 | HHH_rd4_0957.pdb |
| SEQ ID NO: 1228 | HHH_rd4_0763.pdb |
| SEQ ID NO: 1229 | EEHEE_rd4_0025.pdb |
| SEQ ID NO: 1230 | EEHEE_rd4_0521.pdb |
| SEQ ID NO: 1231 | EEHEE_rd4_0663.pdb |
| SEQ ID NO: 1232 | HHH_rd1_0230.pdb |
| SEQ ID NO: 1233 | EEHEE_rd4_0455.pdb |
| SEQ ID NO: 1234 | EEHEE_rd4_0367.pdb |
| SEQ ID NO: 1235 | HHH_rd4_0910.pdb |
| SEQ ID NO: 1236 | EHEE_rd4_0638.pdb |
| SEQ ID NO: 1237 | EEHEE_rd4_0214.pdb |
| SEQ ID NO: 1238 | HHH_rd4_0334.pdb |
| SEQ ID NO: 1239 | HHH_rd4_0969.pdb |
| SEQ ID NO: 1240 | HHH_rd4_0257.pdb |
| SEQ ID NO: 1241 | HHH_rd1_0493.pdb |
| SEQ ID NO: 1242 | HHH_rd4_0209.pdb |
| SEQ ID NO: 1243 | EHEE_rd4_0453.pdb |
| SEQ ID NO: 1244 | EEHEE_rd4_0322.pdb |
| SEQ ID NO: 1245 | HHH_rd4_0916.pdb |
| SEQ ID NO: 1246 | HHH_rd4_0611.pdb |
| SEQ ID NO: 1247 | HHH_rd1_0296.pdb |
| SEQ ID NO: 1248 | EHEE_rd2_1270.pdb |
| SEQ ID NO: 1249 | EHEE_rd4_0322.pdb |
| SEQ ID NO: 1250 | EEHEE_rd4_0621.pdb |
| SEQ ID NO: 1251 | EHEE_rd3_0022.pdb |
| SEQ ID NO: 1252 | EHEE_rd4_0925.pdb |
| SEQ ID NO: 1253 | EEHEE_rd4_0034.pdb |
| SEQ ID NO: 1254 | HHH_rd4_0371.pdb |
| SEQ ID NO: 1255 | HHH_rd4_0072.pdb |
| SEQ ID NO: 1256 | EHEE_rd4_0840.pdb |
| SEQ ID NO: 1257 | EHEE_rd4_0234.pdb |
| SEQ ID NO: 1258 | EEHEE_rd4_0953.pdb |
| SEQ ID NO: 1259 | EEHEE_rd3_0236.pdb |
| SEQ ID NO: 1260 | EEHEE_rd3_1281.pdb |
| SEQ ID NO: 1261 | HHH_rd3_0172.pdb |
| SEQ ID NO: 1262 | HHH_rd4_0519.pdb |
| SEQ ID NO: 1263 | HHH_rd1_0477.pdb |
| SEQ ID NO: 1264 | HHH_rd1_0223.pdb |
| SEQ ID NO: 1265 | EHEE_rd4_0597.pdb |
| SEQ ID NO: 1266 | EEHEE_rd3_0888.pdb |
| SEQ ID NO: 1267 | HHH_rd3_0150.pdb |
| SEQ ID NO: 1268 | EEHEE_rd4_0549.pdb |
| SEQ ID NO: 1269 | EHEE_rd4_0117.pdb |
| SEQ ID NO: 1270 | HHH_rd2_0035.pdb |
| SEQ ID NO: 1271 | HHH_rd4_0329.pdb |
| SEQ ID NO: 1272 | EEHEE_rd4_0236.pdb |
| SEQ ID NO: 1273 | HHH_rd4_0649.pdb |
| SEQ ID NO: 1274 | HHH_rd1_0652.pdb |
| SEQ ID NO: 1275 | HHH_rd4_0583.pdb |
| SEQ ID NO: 1276 | HHH_rd4_0076.pdb |
| SEQ ID NO: 1277 | HHH_rd1_0484.pdb |
| SEQ ID NO: 1278 | HHH_rd4_0286.pdb |
| SEQ ID NO: 1279 | HHH_rd2_0224.pdb |
| SEQ ID NO: 1280 | HHH_rd2_0172.pdb |
| SEQ ID NO: 1281 | HHH_rd4_0948.pdb |
| SEQ ID NO: 1282 | HHH_rd4_0665.pdb |
| SEQ ID NO: 1283 | HEEH_rd3_0212.pdb |
| SEQ ID NO: 1284 | EHEE_rd4_0065.pdb |
| SEQ ID NO: 1285 | HHH_rd3_0128.pdb |
| SEQ ID NO: 1286 | HHH_rd4_0962.pdb |
| SEQ ID NO: 1287 | HHH_rd3_0186.pdb |
| SEQ ID NO: 1288 | EHEE_rd4_0413.pdb |
| SEQ ID NO: 1289 | EEHEE_rd4_0082.pdb |
| SEQ ID NO: 1290 | EEHEE_rd4_0312.pdb |
| SEQ ID NO: 1291 | EHEE_rd4_0048.pdb |
| SEQ ID NO: 1292 | EEHEE_rd4_0080.pdb |
| SEQ ID NO: 1293 | EEHEE_rd3_1234.pdb |
| SEQ ID NO: 1294 | HHH_rd1_0741.pdb |
| SEQ ID NO: 1295 | EHEE_rd4_0999.pdb |
| SEQ ID NO: 1296 | EEHEE_rd4_0266.pdb |
| SEQ ID NO: 1297 | HHH_rd4_0544.pdb |
| SEQ ID NO: 1298 | EHEE_rd4_0567.pdb |
| SEQ ID NO: 1299 | HHH_rd4_0040.pdb |
| SEQ ID NO: 1300 | EEHEE_rd4_0061.pdb |
| SEQ ID NO: 1301 | EHEE_rd4_0104.pdb |
| SEQ ID NO: 1302 | EHEE_rd2_0191.pdb |
| SEQ ID NO: 1303 | HEEH_rd4_0663.pdb |
| SEQ ID NO: 1304 | EHEE_rd4_0066.pdb |
| SEQ ID NO: 1305 | EHEE_rd4_0157.pdb |
| SEQ ID NO: 1306 | EEHEE_rd4_0711.pdb |
| SEQ ID NO: 1307 | EEHEE_rd3_0602.pdb |
| SEQ ID NO: 1308 | HHH_rd1_0432.pdb |
| SEQ ID NO: 1309 | EEHEE_rd4_0751.pdb |
| SEQ ID NO: 1310 | EEHEE_rd4_0511.pdb |
| SEQ ID NO: 1311 | HHH_rd4_0785.pdb |
| SEQ ID NO: 1312 | EEHEE_rd3_0157.pdb |
| SEQ ID NO: 1313 | HHH_rd4_0446.pdb |
| SEQ ID NO: 1314 | EEHEE_rd3_0081.pdb |
| SEQ ID NO: 1315 | EEHEE_rd3_1484.pdb |
| SEQ ID NO: 1316 | HHH_rd2_0081.pdb |
| SEQ ID NO: 1317 | HHH_rd1_0335.pdb |
| SEQ ID NO: 1318 | HHH_rd4_0830.pdb |
| SEQ ID NO: 1319 | EHEE_rd1_0407.pdb |
| SEQ ID NO: 1320 | EEHEE_rd4_0032.pdb |
| SEQ ID NO: 1321 | EEHEE_rd4_0206.pdb |
| SEQ ID NO: 1322 | HHH_rd4_0512.pdb |
| SEQ ID NO: 1323 | HHH_rd4_0403.pdb |
| SEQ ID NO: 1324 | EHEE_rd4_0170.pdb |
| SEQ ID NO: 1325 | HHH_rd4_0558.pdb |
| SEQ ID NO: 1326 | HHH_rd4_0644.pdb |
| SEQ ID NO: 1327 | HHH_rd4_0108.pdb |
| SEQ ID NO: 1328 | EEHEE_rd4_0468.pdb |
| SEQ ID NO: 1329 | EHEE_rd2_1186.pdb |
| SEQ ID NO: 1330 | HHH_rd3_0242.pdb |
| SEQ ID NO: 1331 | EEHEE_rd4_0099.pdb |
| SEQ ID NO: 1332 | HHH_rd3_0111.pdb |
| SEQ ID NO: 1333 | HHH_rd3_0244.pdb |
| SEQ ID NO: 1334 | HHH_rd4_0495.pdb |
| SEQ ID NO: 1335 | HHH_rd1_0609.pdb |
| SEQ ID NO: 1336 | HHH_rd3_0218.pdb |
| SEQ ID NO: 1337 | EEHEE_rd4_0827.pdb |
| SEQ ID NO: 1338 | HHH_rd4_0719.pdb |
| SEQ ID NO: 1339 | HHH_rd4_0322.pdb |
| SEQ ID NO: 1340 | EEHEE_rd4_0203.pdb |
| SEQ ID NO: 1341 | EHEE_rd4_0058.pdb |
| SEQ ID NO: 1342 | HHH_rd1_0574.pdb |
| SEQ ID NO: 1343 | HHH_rd4_0946.pdb |
| SEQ ID NO: 1344 | HHH_rd4_0646.pdb |
| SEQ ID NO: 1345 | HHH_rd4_0370.pdb |
| SEQ ID NO: 1346 | EEHEE_rd3_0256.pdb |
| SEQ ID NO: 1347 | EEHEE_rd4_0251.pdb |
| SEQ ID NO: 1348 | EEHEE_rd4_0917.pdb |
| SEQ ID NO: 1349 | HHH_rd4_0818.pdb |
| SEQ ID NO: 1350 | EHEE_rd4_0962.pdb |
| SEQ ID NO: 1351 | EHEE_rd4_0415.pdb |
| SEQ ID NO: 1352 | EHEE_rd4_0060.pdb |
| SEQ ID NO: 1353 | HHH_rd4_0972.pdb |
| SEQ ID NO: 1354 | HHH_rd2_0151.pdb |
| SEQ ID NO: 1355 | EEHEE_rd4_0700.pdb |
| SEQ ID NO: 1356 | EEHEE_rd4_0649.pdb |
| SEQ ID NO: 1357 | EHEE_rd4_0098.pdb |
| SEQ ID NO: 1358 | EHEE_rd2_0111.pdb |
| SEQ ID NO: 1359 | EEHEE_rd4_0374.pdb |
| SEQ ID NO: 1360 | EEHEE_rd4_0178.pdb |
| SEQ ID NO: 1361 | HHH_rd1_0039.pdb |
| SEQ ID NO: 1362 | HHH_rd4_0368.pdb |
| SEQ ID NO: 1363 | HHH_rd2_0037.pdb |
| SEQ ID NO: 1364 | HHH_rd4_0780.pdb |
| SEQ ID NO: 1365 | EHEE_rd4_0200.pdb |
| SEQ ID NO: 1366 | EHEE_rd4_0874.pdb |
| SEQ ID NO: 1367 | HHH_rd2_0169.pdb |
| SEQ ID NO: 1368 | EEHEE_rd3_0220.pdb |
| SEQ ID NO: 1369 | HHH_rd4_0427.pdb |
| SEQ ID NO: 1370 | HHH_rd4_0669.pdb |
| SEQ ID NO: 1371 | EHEE_rd4_0923.pdb |
| SEQ ID NO: 1372 | EHEE_rd2_0018.pdb |
| SEQ ID NO: 1373 | EHEE_rd4_0947.pdb |
| SEQ ID NO: 1374 | HHH_rd3_0041.pdb |
| SEQ ID NO: 1375 | HHH_rd3_0228.pdb |
| SEQ ID NO: 1376 | EEHEE_rd4_0875.pdb |
| SEQ ID NO: 1377 | HEEH_rd4_0388.pdb |
| SEQ ID NO: 1378 | EEHEE_rd3_1514.pdb |
| SEQ ID NO: 1379 | HHH_rd4_0693.pdb |
| SEQ ID NO: 1380 | EEHEE_rd4_0485.pdb |
| SEQ ID NO: 1381 | HHH_rd4_0124.pdb |
| SEQ ID NO: 1382 | EEHEE_rd4_0392.pdb |
| SEQ ID NO: 1383 | EEHEE_rd4_0702.pdb |
| SEQ ID NO: 1384 | EHEE_rd4_0094.pdb |
| SEQ ID NO: 1385 | HHH_rd1_0769.pdb |
| SEQ ID NO: 1386 | EEHEE_rd4_0410.pdb |
| SEQ ID NO: 1387 | EHEE_rd4_0609.pdb |
| SEQ ID NO: 1388 | HHH_rd4_0388.pdb |
| SEQ ID NO: 1389 | EHEE_rd4_0297.pdb |
| SEQ ID NO: 1390 | EEHEE_rd4_0347.pdb |
| SEQ ID NO: 1391 | HHH_rd2_0050.pdb |
| SEQ ID NO: 1392 | HHH_rd2_0116.pdb |
| SEQ ID NO: 1393 | EEHEE_rd3_0020.pdb |
| SEQ ID NO: 1394 | HHH_rd2_0095.pdb |
| SEQ ID NO: 1395 | HHH_rd4_0411.pdb |
| SEQ ID NO: 1396 | EHEE_rd4_0006.pdb |
| SEQ ID NO: 1397 | EEHEE_rd4_0183.pdb |
| SEQ ID NO: 1398 | EEHEE_rd4_0650.pdb |
| SEQ ID NO: 1399 | HHH_rd4_0268.pdb |
| SEQ ID NO: 1400 | HHH_rd4_0274.pdb |
| SEQ ID NO: 1401 | HHH_rd4_0278.pdb |
| SEQ ID NO: 1402 | EHEE_rd2_0139.pdb |
| SEQ ID NO: 1403 | HHH_rd4_0306.pdb |
| SEQ ID NO: 1404 | EHEE_rd2_0647.pdb |
| SEQ ID NO: 1405 | HHH_rd4_0797.pdb |
| SEQ ID NO: 1406 | EEHEE_rd3_0104.pdb |
| SEQ ID NO: 1407 | EEHEE_rd4_0133.pdb |
| SEQ ID NO: 1408 | HHH_rd4_0929.pdb |
| SEQ ID NO: 1409 | HHH_rd4_0160.pdb |
| SEQ ID NO: 1410 | HHH_rd1_0092.pdb |
| SEQ ID NO: 1411 | EEHEE_rd4_0691.pdb |
| SEQ ID NO: 1412 | HHH_rd1_0125.pdb |
| SEQ ID NO: 1413 | EEHEE_rd3_1818.pdb |
| SEQ ID NO: 1414 | HHH_rd4_0240.pdb |
| SEQ ID NO: 1415 | EEHEE_rd3_0309.pdb |
| SEQ ID NO: 1416 | HHH_rd4_0846.pdb |
| SEQ ID NO: 1417 | EEHEE_rd4_0607.pdb |
| SEQ ID NO: 1418 | EEHEE_rd3_0523.pdb |
| SEQ ID NO: 1419 | EEHEE_rd4_0359.pdb |
| SEQ ID NO: 1420 | EEHEE_rd3_0393.pdb |
| SEQ ID NO: 1421 | EHEE_rd4_0639.pdb |
| SEQ ID NO: 1422 | EHEE_rd1_0338.pdb |
| SEQ ID NO: 1423 | EHEE_rd2_0231.pdb |
| SEQ ID NO: 1424 | EEHEE_rd4_0185.pdb |
| SEQ ID NO: 1425 | HHH_rd1_0580.pdb |
| SEQ ID NO: 1426 | HHH_rdl_0322.pdb |
| SEQ ID NO: 1427 | HHH_rd4_0466.pdb |
| SEQ ID NO: 1428 | HEEH_rd4_0094.pdb |
| SEQ ID NO: 1429 | EHEE_rd4_0145.pdb |
| SEQ ID NO: 1430 | HHH_rd4_0691.pdb |
| SEQ ID NO: 1431 | HHH_rd4_0777.pdb |
| SEQ ID NO: 1432 | HHH_rd4_0712.pdb |
| SEQ ID NO: 1433 | EEHEE_rd3_1706.pdb |
| SEQ ID NO: 1434 | HHH_rd1_0530.pdb |
| SEQ ID NO: 1435 | HHH_rd1_0434.pdb |
| SEQ ID NO: 1436 | HHH_rd4_0605.pdb |
| SEQ ID NO: 1437 | EHEE_rd2_0531.pdb |
| SEQ ID NO: 1438 | EHEE_rd4_0614.pdb |
| SEQ ID NO: 1439 | EEHEE_rd4_0550.pdb |
| SEQ ID NO: 1440 | EHEE_rd4_0592.pdb |
| SEQ ID NO: 1441 | HHH_rd3_0247.pdb |
| SEQ ID NO: 1442 | EEHEE_rd4_0196.pdb |
| SEQ ID NO: 1443 | EEHEE_rd3_1612.pdb |
| SEQ ID NO: 1444 | EHEE_rd4_0530.pdb |
| SEQ ID NO: 1445 | HHH_rd4_0215.pdb |
| SEQ ID NO: 1446 | HHH_rd1_0195.pdb |
| SEQ ID NO: 1447 | EHEE_rd4_0524.pdb |
| SEQ ID NO: 1448 | EHEE_rd4_0509.pdb |
| SEQ ID NO: 1449 | HHH_rd4_0654.pdb |
| SEQ ID NO: 1450 | HHH_rd3_0006.pdb |
| SEQ ID NO: 1451 | EHEE_rd4_1000.pdb |
| SEQ ID NO: 1452 | HHH_rd4_0613.pdb |
| SEQ ID NO: 1453 | EEHEE_rd4_0397.pdb |
| SEQ ID NO: 1454 | HHH_rd4_0535.pdb |
| SEQ ID NO: 1455 | EEHEE_rd4_0463.pdb |
| SEQ ID NO: 1456 | EEHEE_rd4_0460.pdb |
| SEQ ID NO: 1457 | HEEH_rd4_0049.pdb |
| SEQ ID NO: 1458 | HHH_rd4_0553.pdb |
| SEQ ID NO: 1459 | EHEE_rd4_0241.pdb |
| SEQ ID NO: 1460 | EEHEE_rd3_0250.pdb |
| SEQ ID NO: 1461 | HHH_rd4_0173.pdb |
| SEQ ID NO: 1462 | EEHEE_rd4_0284.pdb |
| SEQ ID NO: 1463 | EEHEE_rd4_0520.pdb |
| SEQ ID NO: 1464 | HHH_rd4_0051.pdb |
| SEQ ID NO: 1465 | EHEE_rd4_0743.pdb |
| SEQ ID NO: 1466 | HHH_rd3_0105.pdb |
| SEQ ID NO: 1467 | HHH_rd3_0044.pdb |
| SEQ ID NO: 1468 | EHEE_rd4_0961.pdb |
| SEQ ID NO: 1469 | HHH_rd4_0817.pdb |
| SEQ ID NO: 1470 | EEHEE_rd4_0923.pdb |
| SEQ ID NO: 1471 | HHH_rd3_0159.pdb |
| SEQ ID NO: 1472 | EEHEE_rd4_0543.pdb |
| SEQ ID NO: 1473 | HHH_rd3_0123.pdb |
| SEQ ID NO: 1474 | EHEE_rd4_0701.pdb |
| SEQ ID NO: 1475 | EEHEE_rd4_0242.pdb |
| SEQ ID NO: 1476 | EEHEE_rd3_1503.pdb |
| SEQ ID NO: 1477 | EEHEE_rd4_0019.pdb |
| SEQ ID NO: 1478 | EEHEE_rd4_0233.pdb |
| SEQ ID NO: 1479 | EEHEE_rd4_0273.pdb |
| SEQ ID NO: 1480 | EEHEE_rd3_0055.pdb |
| SEQ ID NO: 1481 | EEHEE_rd4_0569.pdb |
| SEQ ID NO: 1482 | EHEE_rd4_0263.pdb |
| SEQ ID NO: 1483 | HHH_rd4_0405.pdb |
| SEQ ID NO: 1484 | EEHEE_rd4_0258.pdb |
| SEQ ID NO: 1485 | EEHEE_rd_0259.pdb |
| SEQ ID NO: 1486 | HHH_rd4_0490.pdb |
| SEQ ID NO: 1487 | EHEE_rd4_0147.pdb |
| SEQ ID NO: 1488 | EEHEE_rd3_1148.pdb |
| SEQ ID NO: 1489 | EEHEE_rd4_0682.pdb |
| SEQ ID NO: 1490 | EEHEE_rd3_0277.pdb |
| SEQ ID NO: 1491 | HHH_rd4_0786.pdb |
| SEQ ID NO: 1492 | EEHEE_rd3_0028.pdb |
| SEQ ID NO: 1493 | HHH_rd2_0240.pdb |
| SEQ ID NO: 1494 | EHEE_rd4_0223.pdb |
| SEQ ID NO: 1495 | EHEE_rd4_0151.pdb |
| SEQ ID NO: 1496 | HHH_rd2_0149.pdb |
| SEQ ID NO: 1497 | EEHEE_rd4_0842.pdb |
| SEQ ID NO: 1498 | EHEE_rd4_0353.pdb |
| SEQ ID NO: 1499 | HHH_rd4_0730.pdb |
| SEQ ID NO: 1500 | HHH_rd4_0713.pdb |
| SEQ ID NO: 1501 | EHEE_rd3_0087.pdb |
| SEQ ID NO: 1502 | HHH_rd2_0237.pdb |
| SEQ ID NO: 1503 | EEHEE_rd3_0710.pdb |
| SEQ ID NO: 1504 | EHEE_rd3_0040.pdb |
| SEQ ID NO: 1505 | EHEE_rd2_0993.pdb |
| SEQ ID NO: 1506 | HHH_rd4_02300.pdb |
| SEQ ID NO: 1507 | HHH_rd3_0058.pdb |
| SEQ ID NO: 1508 | EHEE_rd2_0207.pdb |
| SEQ ID NO: 1509 | EEHEE_rd4_0119.pdb |
| SEQ ID NO: 1510 | EEHEE_rd4_0308.pdb |
| SEQ ID NO: 1511 | HHH_rd3_0003.pdb |
| SEQ ID NO: 1512 | HHH_rd3_0001.pdb |
| SEQ ID NO: 1513 | EHEE_rd2_1138.pdb |
| SEQ ID NO: 1514 | EEHEE_rd4_0092.pdb |
| SEQ ID NO: 1515 | EHEE_rd4_0877.pdb |
| SEQ ID NO: 1516 | EHEE_rd4_0882.pdb |
| SEQ ID NO: 1517 | EHEE_rd2_0193.pdb |
| SEQ ID NO: 1518 | EEHEE_rd4_0054.pdb |
| SEQ ID NO: 1519 | HHH_rd1_0762.pdb |
| SEQ ID NO: 1520 | EEHEE_rd4_0043.pdb |
| SEQ ID NO: 1521 | HHH_rd4_0224.pdb |
| SEQ ID NO: 1522 | EHEE_rd4_0027.pdb |
| SEQ ID NO: 1523 | HHH_rd4_0852.pdb |
| SEQ ID NO: 1524 | EHEE_rd3_0037.pdb |
| SEQ ID NO: 1525 | EEHEE_rd4_0287.pdb |
| SEQ ID NO: 1526 | HHH_rd3_0140.pdb |
| SEQ ID NO: 1527 | HEEH_rd2_0727.pdb |
| SEQ ID NO: 1528 | EEHEE_rd3_1065.pdb |
| SEQ ID NO: 1529 | EHEE_rd4_0307.pdb |
| SEQ ID NO: 1530 | EEHEE_rd4_0333.pdb |
| SEQ ID NO: 1531 | HHH_rd1_0578.pdb |
| SEQ ID NO: 1532 | EEHEE_rd2_0770.pdb |
| SEQ ID NO: 1533 | EEHEE_rd4_0297.pdb |
| SEQ ID NO: 1534 | EHEE_rd4_0613.pdb |
| SEQ ID NO: 1535 | EEHEE_rd4_0219.pdb |
| SEQ ID NO: 1536 | EEHEE_rd4_0205.pdb |
| SEQ ID NO: 1537 | HHH_rd1_0444.pdb |
| SEQ ID NO: 1538 | HHH_rd1_0472.pdb |
| SEQ ID NO: 1539 | HHH_rd2_0047.pdb |
| SEQ ID NO: 1540 | EEHEE_rd3_1176.pdb |
| SEQ ID NO: 1541 | EEHEE_rd4_0841.pdb |
| SEQ ID NO: 1542 | EHEE_rd4_0761.pdb |
| SEQ ID NO: 1543 | EEHEE_rd4_0784.pdb |
| SEQ ID NO: 1544 | EEHEE_rd3_1558.pdb |
| SEQ ID NO: 1545 | HHH_rd1_0239.pdb |
| SEQ ID NO: 1546 | EEHEE_rd3_0144.pdb |
| SEQ ID NO: 1547 | EHEE_rd3_0014.pdb |
| SEQ ID NO: 1548 | HHH_rd4_0477.pdb |
| SEQ ID NO: 1549 | HHH_rd4_0443.pdb |
| SEQ ID NO: 1550 | EEHEE_rd4_0558.pdb |
| SEQ ID NO: 1551 | HHH_rd3_0030.pdb |
| SEQ ID NO: 1552 | EHEE_rd2_0028.pdb |
| SEQ ID NO: 1553 | HHH_rd4_0360.pdb |
| SEQ ID NO: 1554 | HHH_rd3_0113.pdb |
| SEQ ID NO: 1555 | EEHEE_rd4_0274.pdb |
| SEQ ID NO: 1556 | HHH_rd1_0451.pdb |
| SEQ ID NO: 1557 | HHH_rd3_0166.pdb |
| SEQ ID NO: 1558 | EEHEE_rd4_0471.pdb |
| SEQ ID NO: 1559 | HHH_rd4_0423.pdb |
| SEQ ID NO: 1560 | HHH_rd4_0892.pdb |
| SEQ ID NO: 1561 | EEHEE_rd4_0036.pdb |
| SEQ ID NO: 1562 | HHH_rd4_0450.pdb |
| SEQ ID NO: 1563 | HHH_rd4_0890.pdb |
| SEQ ID NO: 1564 | HHH_rd4_0500.pdb |
| SEQ ID NO: 1565 | HHH_rd4_0672.pdb |
| SEQ ID NO: 1566 | HHH_rd4_0801.pdb |
| SEQ ID NO: 1567 | EHEE_rd4_0295.pdb |
| SEQ ID NO: 1568 | EEHEE_rd4_0731.pdb |
| SEQ ID NO: 1569 | EHEE_rd4_0039.pdb |
| SEQ ID NO: 1570 | EEHEE_rd4_0362.pdb |
| SEQ ID NO: 1571 | EHEE_rd4_0506.pdb |
| SEQ ID NO: 1572 | EEHEE_rd4_0762.pdb |
| SEQ ID NO: 1573 | EHEE_rd2_0195.pdb |
| SEQ ID NO: 1574 | EHEE_rd4_0960.pdb |
| SEQ ID NO: 1575 | HHH_rd4_0568.pdb |
| SEQ ID NO: 1576 | EHEE_rd3_0104.pdb |
| SEQ ID NO: 1577 | EHEE_rd4_0714.pdb |
| SEQ ID NO: 1578 | EEHEE_rd3_0203.pdb |
| SEQ ID NO: 1579 | HHH_rd4_0241.pdb |
| SEQ ID NO: 1580 | EHEE_rd2_0333.pdb |
| SEQ ID NO: 1581 | EEHEE_rd4_0890.pdb |
| SEQ ID NO: 1582 | EEHEE_rd4_0278.pdb |
| SEQ ID NO: 1583 | HHH_rd1_0022.pdb |
| SEQ ID NO: 1584 | HHH_rd4_0364.pdb |
| SEQ ID NO: 1585 | HHH_rd4_0698.pdb |
| SEQ ID NO: 1586 | HHH_rd4_0506.pdb |
| SEQ ID NO: 1587 | EEHEE_rd3_0057.pdb |
| SEQ ID NO: 1588 | EHEE_rd4_0618.pdb |
| SEQ ID NO: 1589 | HHH_rd4_0625.pdb |
| SEQ ID NO: 1590 | HHH_rd3_0108.pdb |
| SEQ ID NO: 1591 | HHH_rd4_0102.pdb |
| SEQ ID NO: 1592 | HHH_rd4_0855.pdb |
| SEQ ID NO: 1593 | HEEH_rd3_0303.pdb |
| SEQ ID NO: 1594 | EEHEE_rd4_0507.pdb |
| SEQ ID NO: 1595 | HHH_rd2_0208.pdb |
| SEQ ID NO: 1596 | EEHEE_rd3_1250.pdb |
| SEQ ID NO: 1597 | EEHEE_rd4_0135.pdb |
| SEQ ID NO: 1598 | HHH_rd4_0661.pdb |
| SEQ ID NO: 1599 | HHH_rd4_0308.pdb |
| SEQ ID NO: 1600 | HHH_rd4_0365.pdb |
| SEQ ID NO: 1601 | EHEE_rd4_0878.pdb |
| SEQ ID NO: 1602 | EEHEE_rd4_0038.pdb |
| SEQ ID NO: 1603 | EHEE_rd4_0444.pdb |
| SEQ ID NO: 1604 | HHH_rd1_0097.pdb |
| SEQ ID NO: 1605 | EEHEE_rd4_0109.pdb |
| SEQ ID NO: 1606 | HEEH_rd3_0731.pdb |
| SEQ ID NO: 1607 | EHEE_rd4_0560.pdb |
| SEQ ID NO: 1608 | HHH_rd4_0389.pdb |
| SEQ ID NO: 1609 | HHH_rd4_0482.pdb |
| SEQ ID NO: 1610 | HHH_rd2_0102.pdb |
| SEQ ID NO: 1611 | EEHEE_rd3_1164.pdb |
| SEQ ID NO: 1612 | EHEE_rd4_0391.pdb |
| SEQ ID NO: 1613 | HHH_rd4_0938.pdb |
| SEQ ID NO: 1614 | EHEE_rd4_0535.pdb |
| SEQ ID NO: 1615 | EEHEE_rd4_0237.pdb |
| SEQ ID NO: 1616 | EEHEE_rd4_0672.pdb |
| SEQ ID NO: 1617 | HHH_rd4_0021.pdb |
| SEQ ID NO: 1618 | EEHEE_rd4_0405.pdb |
| SEQ ID NO: 1619 | EEHEE_rd4_0175.pdb |
| SEQ ID NO: 1620 | EEHEE_rd3_0556.pdb |
| SEQ ID NO: 1621 | EEHEE_rd3_0253.pdb |
| SEQ ID NO: 1622 | HHH_rd4_0753.pdb |
| SEQ ID NO: 1623 | EEHEE_rd3_0525.pdb |
| SEQ ID NO: 1624 | EHEE_rd4_0866.pdb |
| SEQ ID NO: 1625 | HHH_rd4_0311.pdb |
| SEQ ID NO: 1626 | EEHEE_rd4_0383.pdb |
| SEQ ID NO: 1627 | HHH_rd4_0381.pdb |
| SEQ ID NO: 1628 | HHH_rd4_0743.pdb |
| SEQ ID NO: 1629 | EHEE_rd4_0433.pdb |
| SEQ ID NO: 1630 | EHEE_rd2_1285.pdb |
| SEQ ID NO: 1631 | HHH_rd4_0359.pdb |
| SEQ ID NO: 1632 | HHH_rd4_0097.pdb |
| SEQ ID NO: 1633 | EHEE_rd4_0425.pdb |
| SEQ ID NO: 1634 | EHEE_rd4_0134.pdb |
| SEQ ID NO: 1635 | EEHEE_rd3_1061.pdb |
| SEQ ID NO: 1636 | EEHEE_rd4_0143.pdb |
| SEQ ID NO: 1637 | HHH_rd4_0391.pdb |
| SEQ ID NO: 1638 | HHH_rd3_0133.pdb |
| SEQ ID NO: 1639 | HHH_rd4_0608.pdb |
| SEQ ID NO: 1640 | EEHEE_rd3_0022.pdb |
| SEQ ID NO: 1641 | HHH_rd1_0160.pdb |
| SEQ ID NO: 1642 | HHH_rd4_0757.pdb |
| SEQ ID NO: 1643 | HHH_rd4_0974.pdb |
| SEQ ID NO: 1644 | EEHEE_rd4_0566.pdb |
| SEQ ID NO: 1645 | HHH_rd4_0778.pdb |
| SEQ ID NO: 1646 | HHH_rd3_0002.pdb |
| SEQ ID NO: 1647 | EEHEE_rd4_0209.pdb |
| SEQ ID NO: 1648 | EHEE_rd4_0679.pdb |
| SEQ ID NO: 1649 | HHH_rd4_0008.pdb |
| SEQ ID NO: 1650 | HHH_rd4_0526.pdb |
| SEQ ID NO: 1651 | EEHEE_rd4_0743.pdb |
| SEQ ID NO: 1652 | HHH_rd4_0077.pdb |
| SEQ ID NO: 1653 | HHH_rd3_0018.pdb |
| SEQ ID NO: 1654 | EEHEE_rd4_0301.pdb |
| SEQ ID NO: 1655 | EEHEE_rd4_0704.pdb |
| SEQ ID NO: 1656 | HHH_rd4_0986.pdb |
| SEQ ID NO: 1657 | EHEE_rd4_0572.pdb |
| SEQ ID NO: 1658 | HHH_rd4_0539.pdb |
| SEQ ID NO: 1659 | HHH_rd4_0896.pdb |
| SEQ ID NO: 1660 | HHH_rd4_0205.pdb |
| SEQ ID NO: 1661 | HEEH_rd3_0142.pdb |
| SEQ ID NO: 1662 | EEHEE_rd4_0081.pdb |
| SEQ ID NO: 1663 | EEHEE_rd4_0375.pdb |
| SEQ ID NO: 1664 | EEHEE_rd4_0411.pdb |
| SEQ ID NO: 1665 | HHH_rd4_0507.pdb |
| SEQ ID NO: 1666 | EEHEE_rd4_0231.pdb |
| SEQ ID NO: 1667 | HHH_rd4_0357.pdb |
| SEQ ID NO: 1668 | HHH_rd1_0428.pdb |
| SEQ ID NO: 1669 | EHEE_rd4_0813.pdb |
| SEQ ID NO: 1670 | EEHEE_rd4_0369.pdb |
| SEQ ID NO: 1671 | HHH_rd4_0222.pdb |
| SEQ ID NO: 1672 | HHH_rd1_0293.pdb |
| SEQ ID NO: 1673 | EEHEE_rd4_0306.pdb |
| SEQ ID NO: 1674 | EHEE_rd4_0173.pdb |
| SEQ ID NO: 1675 | EEHEE_rd3_0225.pdb |
| SEQ ID NO: 1676 | EHEE_rd3_0053.pdb |
| SEQ ID NO: 1677 | HHH_rd1_0371.pdb |
| SEQ ID NO: 1678 | HHH_rd3_0103.pdb |
| SEQ ID NO: 1679 | EEHEE_rd4_0164.pdb |
| SEQ ID NO: 1680 | EEHEE_rd4_0786.pdb |
| SEQ ID NO: 1681 | HHH_rd3_0045.pdb |
| SEQ ID NO: 1682 | HHH_rd4_0293.pdb |
| SEQ ID NO: 1683 | EHEE_rd4_0671.pdb |
| SEQ ID NO: 1684 | HHH_rd4_0725.pdb |
| SEQ ID NO: 1685 | HHH_rd4_0704.pdb |
| SEQ ID NO: 1686 | EHEE_rd4_0662.pdb |
| SEQ ID NO: 1687 | EEHEE_rd4_0180.pdb |
| SEQ ID NO: 1688 | HHH_rd1_0221.pdb |
| SEQ ID NO: 1689 | HHH_rd4_0198.pdb |
| SEQ ID NO: 1690 | EEHEE_rd4_0801.pdb |
| SEQ ID NO: 1691 | EHEE_rd4_0385.pdb |
| SEQ ID NO: 1692 | EEHEE_rd4_0161.pdb |
| SEQ ID NO: 1693 | EHEE_rd2_0886.pdb |
| SEQ ID NO: 1694 | HHH_rd4_0937.pdb |
| SEQ ID NO: 1695 | EEHEE_rd3_0985.pdb |
| SEQ ID NO: 1696 | EEHEE_rd3_0204.pdb |
| SEQ ID NO: 1697 | HHH_rd4_0803.pdb |
| SEQ ID NO: 1698 | HHH_rd4_0337.pdb |
| SEQ ID NO: 1699 | EEHEE_rd4_0972.pdb |
| SEQ ID NO: 1700 | HHH_rd4_0207.pdb |
| SEQ ID NO: 1701 | EEHEE_rd4_0277.pdb |
| SEQ ID NO: 1702 | EHEE_rd4_0394.pdb |
| SEQ ID NO: 1703 | EHEE_rd3_0035.pdb |
| SEQ ID NO: 1704 | EHEE_rd4_0515.pdb |
| SEQ ID NO: 1705 | EHEE_rd3_0109.pdb |
| SEQ ID NO: 1706 | HHH_rd4_0282.pdb |
| SEQ ID NO: 1707 | HHH_rd1_0692.pdb |
| SEQ ID NO: 1708 | HHH_rd3_0136.pdb |
| SEQ ID NO: 1709 | EHEE_rd4_0332.pdb |
| SEQ ID NO: 1710 | HHH_rd4_0727.pdb |
| SEQ ID NO: 1711 | HHH_rd1_0191.pdb |
| SEQ ID NO: 1712 | EHEE_rd2_0265.pdb |
| SEQ ID NO: 1713 | EEHEE_rd4_0325.pdb |
| SEQ ID NO: 1714 | HHH_rd2_0067.pdb |
| SEQ ID NO: 1715 | EEHEE_rd3_0168.pdb |
| SEQ ID NO: 1716 | EEHEE_rd4_0630.pdb |
| SEQ ID NO: 1717 | EEHEE_rd4_0046.pdb |
| SEQ ID NO: 1718 | EEHEE_rd3_0303.pdb |
| SEQ ID NO: 1719 | HHH_rd4_0413.pdb |
| SEQ ID NO: 1720 | EHEE_rd4_0794.pdb |
| SEQ ID NO: 1721 | HHH_rd3_0216.pdb |
| SEQ ID NO: 1722 | EHEE_rd4_0643.pdb |
| SEQ ID NO: 1723 | EHEE_rd4_0973.pdb |
| SEQ ID NO: 1724 | HHH_rd4_0706.pdb |
| SEQ ID NO: 1725 | EEHEE_rd4_0409.pdb |
| SEQ ID NO: 1726 | EHEE_rd4_0191.pdb |
| SEQ ID NO: 1727 | HHH_rd3_0013.pdb |
| SEQ ID NO: 1728 | HHH_rd4_0614.pdb |
| SEQ ID NO: 1729 | HHH_rd1_0265.pdb |
| SEQ ID NO: 1730 | HHH_rd1_0139.pdb |
| SEQ ID NO: 1731 | EEHEE_rd4_0533.pdb |
| SEQ ID NO: 1732 | HHH_rd4_0767.pdb |
| SEQ ID NO: 1733 | EEHEE_rd3_0051.pdb |
| SEQ ID NO: 1734 | HHH_rd4_0960.pdb |
| SEQ ID NO: 1735 | EEHEE_rd4_0122.pdb |
| SEQ ID NO: 1736 | HHH_rd4_0663.pdb |
| SEQ ID NO: 1737 | EEHEE_rd4_0609.pdb |
| SEQ ID NO: 1738 | EHEE_rd4_0528.pdb |
| SEQ ID NO: 1739 | EEHEE_rd4_0552.pdb |
| SEQ ID NO: 1740 | HHH_rd4_0748.pdb |
| SEQ ID NO: 1741 | EEHEE_rd4_0045.pdb |
| SEQ ID NO: 1742 | HHH_rd1_0062.pdb |
| SEQ ID NO: 1743 | HHH_rd1_0203.pdb |
| SEQ ID NO: 1744 | EEHEE_rd3_1474.pdb |
| SEQ ID NO: 1745 | EHEE_rd4_0464.pdb |
| SEQ ID NO: 1746 | HHH_rd4_0451.pdb |
| SEQ ID NO: 1747 | HHH_rd4_0292.pdb |
| SEQ ID NO: 1748 | EEHEE_rd4_0304.pdb |
| SEQ ID NO: 1749 | EHEE_rd4_0029.pdb |
| SEQ ID NO: 1750 | EEHEE_rd4_0366.pdb |
| SEQ ID NO: 1751 | EEHEE_rd3_1395.pdb |
| SEQ ID NO: 1752 | HHH_rd4_0433.pdb |
| SEQ ID NO: 1753 | EEHEE_rd3_1088.pdb |
| SEQ ID NO: 1754 | HHH_rd4_0633.pdb |
| SEQ ID NO: 1755 | HHH_rd4_0881.pdb |
| SEQ ID NO: 1756 | EEHEE_rd4_0482.pdb |
| SEQ ID NO: 1757 | EEHEE_rd3_0271.pdb |
| SEQ ID NO: 1758 | EEHEE_rd4_0462.pdb |
| SEQ ID NO: 1759 | EHEE_rd4_0254.pdb |
| SEQ ID NO: 1760 | EEHEE_rd4_0479.pdb |
| SEQ ID NO: 1761 | EEHEE_rd3_1600.pdb |
| SEQ ID NO: 1762 | EEHEE_rd4_0860.pdb |
| SEQ ID NO: 1763 | EEHEE_rd3_1582.pdb |
| SEQ ID NO: 1764 | EEHEE_rd4_0388.pdb |
| SEQ ID NO: 1765 | HHH_rd4_0560.pdb |
| SEQ ID NO: 1766 | EHEE_rd1_0559.pdb |
| SEQ ID NO: 1767 | HHH_rd2_0231.pdb |
| SEQ ID NO: 1768 | EEHEE_rd4_0436.pdb |
| SEQ ID NO: 1769 | HHH_rd4_0043.pdb |
| SEQ ID NO: 1770 | HHH_rd1_0517.pdb |
| SEQ ID NO: 1771 | EEHEE_rd3_0210.pdb |
| SEQ ID NO: 1772 | EHEE_rd4_0991.pdb |
| SEQ ID NO: 1773 | EEHEE_rd4_0398.pdb |
| SEQ ID NO: 1774 | HHH_rd2_0083.pdb |
| SEQ ID NO: 1775 | EEHEE_rd4_0267.pdb |
| SEQ ID NO: 1776 | EHEE_rd3_0105.pdb |
| SEQ ID NO: 1777 | HHH_rd4_0002.pdb |
| SEQ ID NO: 1778 | EEHEE_rd3_0146.pdb |
| SEQ ID NO: 1779 | EEHEE_rd3_0021.pdb |
| SEQ ID NO: 1780 | EHEE_rd2_0880.pdb |
| SEQ ID NO: 1781 | HHH_rd4_0973.pdb |
| SEQ ID NO: 1782 | HHH_rd4_0025.pdb |
| SEQ ID NO: 1783 | HHH_rd1_0167.pdb |
| SEQ ID NO: 1784 | HHH_rd4_0015.pdb |
| SEQ ID NO: 1785 | EHEE_rd4_0215.pdb |
| SEQ ID NO: 1786 | HHH_rd4_0236.pdb |
| SEQ ID NO: 1787 | EEHEE_rd4_0321.pdb |
| SEQ ID NO: 1788 | EEHEE_rd4_0238.pdb |
| SEQ ID NO: 1789 | EHEE_rd4_0255.pdb |
| SEQ ID NO: 1790 | EHEE_rd4_0596.pdb |
| SEQ ID NO: 1791 | HHH_rd4_0480.pdb |
| SEQ ID NO: 1792 | EHEE_rd2_1075.pdb |
| SEQ ID NO: 1793 | EEHEE_rd3_0296.pdb |
| SEQ ID NO: 1794 | EEHEE_rd4_0380.pdb |
| SEQ ID NO: 1795 | HHH_rd1_0256.pdb |
| SEQ ID NO: 1796 | EEHEE_rd3_1733.pdb |
| SEQ ID NO: 1797 | EEHEE_rd3_1771.pdb |
| SEQ ID NO: 1798 | EEHEE_rd4_0293.pdb |
| SEQ ID NO: 1799 | EHEE_rd3_0081.pdb |
| SEQ ID NO: 1800 | EEHEE_rd4_0354.pdb |
| SEQ ID NO: 1801 | EEHEE_rd4_0162.pdb |
| SEQ ID NO: 1802 | HEEH_rd3_0128.pdb |
| SEQ ID NO: 1803 | HHH_rd2_0087.pdb |
| SEQ ID NO: 1804 | EEHEE_rd4_0086.pdb |
| SEQ ID NO: 1805 | HHH_rd4_0351.pdb |
| SEQ ID NO: 1806 | EEHEE_rd3_0094.pdb |
| SEQ ID NO: 1807 | EEHEE_rd4_0378.pdb |
| SEQ ID NO: 1808 | HHH_rd4_0033.pdb |
| SEQ ID NO: 1809 | EEHEE_rd4_0371.pdb |
| SEQ ID NO: 1810 | EEHEE_rd4_0403.pdb |
| SEQ ID NO: 1811 | EEHEE_rd3_1436.pdb |
| SEQ ID NO: 1812 | HHH_rd3_0129.pdb |
| SEQ ID NO: 1813 | HHH_rd4_0860.pdb |
| SEQ ID NO: 1814 | EEHEE_rd4_0660.pdb |
| SEQ ID NO: 1815 | EEHEE_rd3_0909.pdb |
| SEQ ID NO: 1816 | EEHEE_rd3_0675.pdb |
| SEQ ID NO: 1817 | HHH_rd4_0755.pdb |
| SEQ ID NO: 1818 | EEHEE_rd4_0692.pdb |
| SEQ ID NO: 1819 | HHH_rd3_0047.pdb |
| SEQ ID NO: 1820 | HHH_rd4_0554.pdb |
| SEQ ID NO: 1821 | EEHEE_rd3_1615.pdb |
| SEQ ID NO: 1822 | HHH_rd1_0554.pdb |
| SEQ ID NO: 1823 | HHH_rd1_0631.pdb |
| SEQ ID NO: 1824 | HHH_rd4_0735.pdb |
| SEQ ID NO: 1825 | HHH_rd4_0968.pdb |
| SEQ ID NO: 1826 | HHH_rd4_0687.pdb |
| SEQ ID NO: 1827 | EHEE_rd4_0829.pdb |
| SEQ ID NO: 1828 | EHEE_rd4_0707.pdb |
| SEQ ID NO: 1829 | EHEE_rd4_0894.pdb |
| SEQ ID NO: 1830 | EEHEE_rd4_0932.pdb |
| SEQ ID NO: 1831 | HHH_rd3_0090.pdb |
| SEQ ID NO: 1832 | EHEE_rd4_0636.pdb |
| SEQ ID NO: 1833 | EEHEE_rd4_0646.pdb |
| SEQ ID NO: 1834 | EEHEE_rd3_1215.pdb |
| SEQ ID NO: 1835 | HHH_rd3_0074.pdb |
| SEQ ID NO: 1836 | EHEE_rd4_0912.pdb |
| SEQ ID NO: 1837 | HEEH_rd3_0713.pdb |
| SEQ ID NO: 1838 | EEHEE_rd4_0986.pdb |
| SEQ ID NO: 1839 | HHH_rd4_0540.pdb |
| SEQ ID NO: 1840 | HHH_rd4_0536.pdb |
| SEQ ID NO: 1841 | HHH_rd4_0871.pdb |
| SEQ ID NO: 1842 | EHEE_rd4_0450.pdb |
| SEQ ID NO: 1843 | EEHEE_rd4_0470.pdb |
| SEQ ID NO: 1844 | EHEE_rd4_0775.pdb |
| SEQ ID NO: 1845 | HEEH_rd3_0002.pdb |
| SEQ ID NO: 1846 | EHEE_rd4_0462.pdb |
| SEQ ID NO: 1847 | HHH_rd4_0889.pdb |
| SEQ ID NO: 1848 | EHEE_rd2_0973.pdb |
| SEQ ID NO: 1849 | EEHEE_rd3_0240.pdb |
| SEQ ID NO: 1850 | HEEH_rd4_0758.pdb |
| SEQ ID NO: 1851 | EEHEE_rd4_0836.pdb |
| SEQ ID NO: 1852 | EEHEE_rd4_0015.pdb |
| SEQ ID NO: 1853 | EHEE_rd2_0165.pdb |
| SEQ ID NO: 1854 | HHH_rd4_0747.pdb |
| SEQ ID NO: 1855 | EEHEE_rd4_0368.pdb |
| SEQ ID NO: 1856 | EHEE_rd4_0093.pdb |
| SEQ ID NO: 1857 | EHEE_rd4_0493.pdb |
| SEQ ID NO: 1858 | EHEE_rd4_0507.pdb |
| SEQ ID NO: 1859 | HHH_rd4_0125.pdb |
| SEQ ID NO: 1860 | HHH_rd1_0602.pdb |
| SEQ ID NO: 1861 | EEHEE_rd4_0748.pdb |
| SEQ ID NO: 1862 | EEHEE_rd4_0147.pdb |
| SEQ ID NO: 1863 | HHH_rd4_0438.pdb |
| SEQ ID NO: 1864 | EHEE_rd4_0533.pdb |
| SEQ ID NO: 1865 | HHH_rd4_0925.pdb |
| SEQ ID NO: 1866 | EEHEE_rd4_0352.pdb |
| SEQ ID NO: 1867 | HHH_rd3_0081.pdb |
| SEQ ID NO: 1868 | EHEE_rd4_0981.pdb |
| SEQ ID NO: 1869 | EHEE_rd2_1257.pdb |
| SEQ ID NO: 1870 | HHH_rd1_0811.pdb |
| SEQ ID NO: 1871 | EHEE_rd4_0590.pdb |
| SEQ ID NO: 1872 | HHH_rd2_0073.pdb |
| SEQ ID NO: 1873 | EHEE_rd4_0889.pdb |
| SEQ ID NO: 1874 | EEHEE_rd4_0100.pdb |
| SEQ ID NO: 1875 | HHH_rd2_0127.pdb |
| SEQ ID NO: 1876 | HHH_rd4_0955.pdb |
| SEQ ID NO: 1877 | EEHEE_rd4_0583.pdb |
| SEQ ID NO: 1878 | EEHEE_rd4_0616.pdb |
| SEQ ID NO: 1879 | HHH_rd3_0078.pdb |
| SEQ ID NO: 1880 | EEHEE_rd3_0062.pdb |
| SEQ ID NO: 1881 | EHEE_rd2_0061.pdb |
| SEQ ID NO: 1882 | EEHEE_rd4_0504.pdb |
| SEQ ID NO: 1883 | HHH_rd1_0288.pdb |
| SEQ ID NO: 1884 | HEEH_rd3_0726.pdb |
| SEQ ID NO: 1885 | EHEE_rd4_0688.pdb |
| SEQ ID NO: 1886 | EEHEE_rd3_0868.pdb |
| SEQ ID NO: 1887 | EEHEE_rd4_0526.pdb |
| SEQ ID NO: 1888 | EHEE_rd4_0883.pdb |
| SEQ ID NO: 1889 | EEHEE_rd4_0307.pdb |
| SEQ ID NO: 1890 | EEHEE_rd4_0138.pdb |
| SEQ ID NO: 1891 | HHH_rd1_0415.pdb |
| SEQ ID NO: 1892 | HHH_rd4_0775.pdb |
| SEQ ID NO: 1893 | HHH_rd1_0866.pdb |
| SEQ ID NO: 1894 | EEHEE_rd4_0578.pdb |
| SEQ ID NO: 1895 | HHH_rd4_0295.pdb |
| SEQ ID NO: 1896 | HHH_rd4_0251.pdb |
| SEQ ID NO: 1897 | EHEE_rd3_0061.pdb |
| SEQ ID NO: 1898 | EEHEE_rd3_0964.pdb |
| SEQ ID NO: 1899 | EHEE_rd4_0855.pdb |
| SEQ ID NO: 1900 | HEEH_rd3_0740.pdb |
| SEQ ID NO: 1901 | HEEH_rd3_0680.pdb |
| SEQ ID NO: 1902 | HHH_rd4_0335.pdb |
| SEQ ID NO: 1903 | HHH_rd3_0071.pdb |
| SEQ ID NO: 1904 | EHEE_rd4_0005.pdb |
| SEQ ID NO: 1905 | HEEH_rd4_0042.pdb |
| SEQ ID NO: 1906 | EEHEE_rd4_0059.pdb |
| SEQ ID NO: 1907 | EEHEE_rd4_0873.pdb |
| SEQ ID NO: 1908 | EHEE_rd3_0130.pdb |
| SEQ ID NO: 1909 | HHH_rd1_0564.pdb |
| SEQ ID NO: 1910 | HHH_rd4_0255.pdb |
| SEQ ID NO: 1911 | EEHEE_rd4_0343.pdb |
| SEQ ID NO: 1912 | EHEE_rd3_0229.pdb |
| SEQ ID NO: 1913 | EEHEE_rd3_1621.pdb |
| SEQ ID NO: 1914 | EEHEE_rd4_0222.pdb |
| SEQ ID NO: 1915 | HHH_rd4_0879.pdb |
| SEQ ID NO: 1916 | HHH_rd4_0458.pdb |
| SEQ ID NO: 1917 | HHH_rd3_0248.pdb |
| SEQ ID NO: 1918 | HHH_rd1_0272.pdb |
| SEQ ID NO: 1919 | HHH_rd4_0953.pdb |
| SEQ ID NO: 1920 | EEHEE_rd4_0428.pdb |
| SEQ ID NO: 1921 | HHH_rd4_0270.pdb |
| SEQ ID NO: 1922 | HHH_rd3_0163.pdb |
| SEQ ID NO: 1923 | EHEE_rd4_0335.pdb |
| SEQ ID NO: 1924 | EHEE_rd4_0047.pdb |
| SEQ ID NO: 1925 | HHH_rd4_0327.pdb |
| SEQ ID NO: 1926 | HEEH_rd2_0127.pdb |
| SEQ ID NO: 1927 | HHH_rd2_0204.pdb |
| SEQ ID NO: 1928 | HHH_rd1_0242.pdb |
| SEQ ID NO: 1929 | HHH_rd2_0236.pdb |
| SEQ ID NO: 1930 | EHEE_rd4_0221.pdb |
| SEQ ID NO: 1931 | EEHEE_rd4_0074.pdb |
| SEQ ID NO: 1932 | EHEE_rd2_0217.pdb |
| SEQ ID NO: 1933 | EEHEE_rd4_0477.pdb |
| SEQ ID NO: 1934 | HHH_rd4_0744.pdb |
| SEQ ID NO: 1935 | EEHEE_rd4_0224.pdb |
| SEQ ID NO: 1936 | EEHEE_rd4_0320.pdb |
| SEQ ID NO: 1937 | EEHEE_rd3_1359.pdb |
| SEQ ID NO: 1938 | EEHEE_rd3_1038.pdb |
| SEQ ID NO: 1939 | HHH_rd4_0863.pdb |
| SEQ ID NO: 1940 | HHH_rd4_0093.pdb |
| SEQ ID NO: 1941 | EEHEE_rd4_0612.pdb |
| SEQ ID NO: 1942 | HHH_rd4_0815.pdb |
| SEQ ID NO: 1943 | EHEE_rd4_0031.pdb |
| SEQ ID NO: 1944 | HHH_rd2_0175.pdb |
| SEQ ID NO: 1945 | HEEH_rd3_0190.pdb |
| SEQ ID NO: 1946 | HHH_rd3_0024.pdb |
| SEQ ID NO: 1947 | EEHEE_rd3_1720.pdb |
| SEQ ID NO: 1948 | EEHEE_rd3_0078.pdb |
| SEQ ID NO: 1949 | HHH_rd1_0306.pdb |
| SEQ ID NO: 1950 | HHH_rd2_0055.pdb |
| SEQ ID NO: 1951 | HHH_rd1_0423.pdb |
| SEQ ID NO: 1952 | EEHEE_rd3_0696.pdb |
| SEQ ID NO: 1953 | EHEE_rd2_1040.pdb |
| SEQ ID NO: 1954 | EHEE_rd4_0377.pdb |
| SEQ ID NO: 1955 | HHH_rd1_0255.pdb |
| SEQ ID NO: 1956 | HHH_rd4_0531.pdb |
| SEQ ID NO: 1957 | HHH_rd4_0522.pdb |
| SEQ ID NO: 1958 | EHEE_rd2_0874.pdb |
| SEQ ID NO: 1959 | EHEE_rd4_0595.pdb |
| SEQ ID NO: 1960 | EHEE_rd2_0972.pdb |
| SEQ ID NO: 1961 | HHH_rd1_0586.pdb |
| SEQ ID NO: 1962 | HHH_rd4_0683.pdb |
| SEQ ID NO: 1963 | HHH_rd4_0701.pdb |
| SEQ ID NO: 1964 | EEHEE_rd4_0051.pdb |
| SEQ ID NO: 1965 | EEHEE_rd4_0562.pdb |
| SEQ ID NO: 1966 | EEHEE_rd4_0576.pdb |
| SEQ ID NO: 1967 | EEHEE_rd4_0112.pdb |
| SEQ ID NO: 1968 | EEHEE_rd4_0624.pdb |
| SEQ ID NO: 1969 | EHEE_rd4_0690.pdb |
| SEQ ID NO: 1970 | EHEE_rd4_0682.pdb |
| SEQ ID NO: 1971 | HHH_rd1_0118.pdb |
| SEQ ID NO: 1972 | HHH_rd3_0236.pdb |
| SEQ ID NO: 1973 | HEEH_rd4_0647.pdb |
| SEQ ID NO: 1974 | EEHEE_rd4_0314.pdb |
| SEQ ID NO: 1975 | EHEE_rd4_0442.pdb |
| SEQ ID NO: 1976 | EEHEE_rd4_0705.pdb |
| SEQ ID NO: 1977 | EEHEE_rd4_0311.pdb |
| SEQ ID NO: 1978 | EEHEE_rd4_0814.pdb |
| SEQ ID NO: 1979 | HHH_rd3_0174.pdb |
| SEQ ID NO: 1980 | EEHEE_rd4_0819.pdb |
| SEQ ID NO: 1981 | EEHEE_rd3_0013.pdb |
| SEQ ID NO: 1982 | EEHEE_rd3_0017.pdb |
| SEQ ID NO: 1983 | HHH_rd3_0130.pdb |
| SEQ ID NO: 1984 | HHH_rd3_0096.pdb |
| SEQ ID NO: 1985 | HHH_rd1_0066.pdb |
| SEQ ID NO: 1986 | EEHEE_rd3_1347.pdb |
| SEQ ID NO: 1987 | EEHEE_rd4_0167.pdb |
| SEQ ID NO: 1988 | HHH_rd4_0911.pdb |
| SEQ ID NO: 1989 | HHH_rd4_0058.pdb |
| SEQ ID NO: 1990 | EHEE_rd4_0750.pdb |
| SEQ ID NO: 1991 | HHH_rd4_0037.pdb |
| SEQ ID NO: 1992 | HHH_rd4_0101.pdb |
| SEQ ID NO: 1993 | HHH_rd1_0684.pdb |
| SEQ ID NO: 1994 | EEHEE_rd3_0987.pdb |
| SEQ ID NO: 1995 | HHH_rd4_0118.pdb |
| SEQ ID NO: 1996 | EHEE_rd4_0727.pdb |
| SEQ ID NO: 1997 | HEEH_rd3_0324.pdb |
| SEQ ID NO: 1998 | EHEE_rd4_0282.pdb |
| SEQ ID NO: 1999 | HHH_rd1_0040.pdb |
| SEQ ID NO: 2000 | EHEE_rd1_0817.pdb |
| SEQ ID NO: 2001 | EEHEE_rd3_0351.pdb |
| SEQ ID NO: 2002 | HHH_rd3_0109.pdb |
| SEQ ID NO: 2003 | EHEE_rd4_0941.pdb |
| SEQ ID NO: 2004 | HHH_rd4_0806.pdb |
| SEQ ID NO: 2005 | HHH_rd1_0674.pdb |
| SEQ ID NO: 2006 | EHEE_rd2_0487.pdb |
| SEQ ID NO: 2007 | HHH_rd1_0450.pdb |
| SEQ ID NO: 2008 | EEHEE_rd3_0907.pdb |
| SEQ ID NO: 2009 | EEHEE_rd4_0590.pdb |
| SEQ ID NO: 2010 | EHEE_rd4_0790.pdb |
| SEQ ID NO: 2011 | EEHEE_rd3_0319.pdb |
| SEQ ID NO: 2012 | HHH_rd4_0720.pdb |
| SEQ ID NO: 2013 | HHH_rd2_0064.pdb |
| SEQ ID NO: 2014 | EEHEE_rd4_0791.pdb |
| SEQ ID NO: 2015 | HHH_rd2_0052.pdb |
| SEQ ID NO: 2016 | HHH_rd3_0119.pdb |
| SEQ ID NO: 2017 | EHEE_rd4_0378.pdb |
| SEQ ID NO: 2018 | EHEE_rd4_0228.pdb |
| SEQ ID NO: 2019 | EHEE_rd2_1106.pdb |
| SEQ ID NO: 2020 | HHH_rd4_0432.pdb |
| SEQ ID NO: 2021 | HEEH_rd4_0024.pdb |
| SEQ ID NO: 2022 | EHEE_rd2_0601.pdb |
| SEQ ID NO: 2023 | HHH_rd4_05347.pdb |
| SEQ ID NO: 2024 | EEHEE_rd4_0426.pdb |
| SEQ ID NO: 2025 | EEHEE_rd4_0413.pdb |
| SEQ ID NO: 2026 | EEHEE_rd4_0467.pdb |
| SEQ ID NO: 2027 | EHEE_rd4_0479.pdb |
| SEQ ID NO: 2028 | HHH_rd4_0884.pdb |
| SEQ ID NO: 2029 | HHH_rd4_0455.pdb |
| SEQ ID NO: 2030 | EEHEE_rd3_0757.pdb |
| SEQ ID NO: 2031 | HHH_rd4_0249.pdb |
| SEQ ID NO: 2032 | HHH_rd4_0545.pdb |
| SEQ ID NO: 2033 | EEHEE_rd3_0650.pdb |
| SEQ ID NO: 2034 | EEHEE_rd3_1570.pdb |
| SEQ ID NO: 2035 | EEHEE_rd3_0709.pdb |
| SEQ ID NO: 2036 | EEHEE_rd4_0843.pdb |
| SEQ ID NO: 2037 | EHEE_rd4_0964.pdb |
| SEQ ID NO: 2038 | HHH_rd4_0971.pdb |
| SEQ ID NO: 2039 | HHH_rd4_0253.pdb |
| SEQ ID NO: 2040 | HHH_rd3_0157.pdb |
| SEQ ID NO: 2041 | HHH_rd4_0823.pdb |
| SEQ ID NO: 2042 | HHH_rd2_0070.pdb |
| SEQ ID NO: 2043 | EEHEE_rd3_0693.pdb |
| SEQ ID NO: 2044 | HHH_rd4_0434.pdb |
| SEQ ID NO: 2045 | EEHEE_rd3_0189.pdb |
| SEQ ID NO: 2046 | HHH_rd3_0126.pdb |
| SEQ ID NO: 2047 | EEHEE_rd3_1324.pdb |
| SEQ ID NO: 2048 | HHH_rd4_0042.pdb |
| SEQ ID NO: 2049 | EHEE_rd4_0904.pdb |
| SEQ ID NO: 2050 | EHEE_rd4_0811.pdb |
| SEQ ID NO: 2051 | EHEE_rd2_0914.pdb |
| SEQ ID NO: 2052 | EEHEE_rd4_0804.pdb |
| SEQ ID NO: 2053 | HHH_rd3_0088.pdb |
| SEQ ID NO: 2054 | HHH_rd4_0721.pdb |
| SEQ ID NO: 2055 | HHH_rd2_0159.pdb |
| SEQ ID NO: 2056 | EEHEE_rd3_1240.pdb |
| SEQ ID NO: 2057 | EEHEE_rd4_0897.pdb |
| SEQ ID NO: 2058 | EHEE_rd4_0642.pdb |
| SEQ ID NO: 2059 | HHH_rd1_0538.pdb |
| SEQ ID NO: 2060 | EEHEE_rd4_0678.pdb |
| SEQ ID NO: 2061 | EEHEE_rd4_0848.pdb |
| SEQ ID NO: 2062 | EHEE_rd4_0114.pdb |
| SEQ ID NO: 2063 | EEHEE_rd4_0191.pdb |
| SEQ ID NO: 2064 | EEHEE_rd4_0883.pdb |
| SEQ ID NO: 2065 | HHH_rd1_0478.pdb |
| SEQ ID NO: 2066 | EEHEE_rd4_0177.pdb |
| SEQ ID NO: 2067 | EHEE_rd4_0606.pdb |
| SEQ ID NO: 2068 | HHH_rd3_0155.pdb |
| SEQ ID NO: 2069 | EEHEE_rd4_0605.pdb |
| SEQ ID NO: 2070 | EEHEE_rd4_0239.pdb |
| SEQ ID NO: 2071 | HHH_rd1_0872.pdb |
| SEQ ID NO: 2072 | EEHEE_rd4_0644.pdb |
| SEQ ID NO: 2073 | EEHEE_rd4_0431.pdb |
| SEQ ID NO: 2074 | EEHEE_rd4_0318.pdb |
| SEQ ID NO: 2075 | EHEE_rd4_0489.pdb |
| SEQ ID NO: 2076 | EHEE_rd4_0414.pdb |
| SEQ ID NO: 2077 | EEHEE_rd4_0997.pdb |
| SEQ ID NO: 2078 | EHEE_rd4_0564.pdb |
| SEQ ID NO: 2079 | EEHEE_rd4_0895.pdb |
| SEQ ID NO: 2080 | EHEE_rd4_0631.pdb |
| SEQ ID NO: 2081 | EHEE_rd4_0089.pdb |
| SEQ ID NO: 2082 | EEHEE_rd4_0310.pdb |
| SEQ ID NO: 2083 | HHH_rd1_0976.pdb |
| SEQ ID NO: 2084 | EEHEE_rd4_0541.pdb |
| SEQ ID NO: 2085 | HHH_rd1_0171.pdb |
| SEQ ID NO: 2086 | HHH_rd2_0188.pdb |
| SEQ ID NO: 2087 | EHEE_rd4_0299.pdb |
| SEQ ID NO: 2088 | EHEE_rd4_0091.pdb |
| SEQ ID NO: 2089 | EEHEE_rd3_0325.pdb |
| SEQ ID NO: 2090 | EHEE_rd4_0112.pdb |
| SEQ ID NO: 2091 | EEHEE_rd3_1492.pdb |
| SEQ ID NO: 2092 | EHEE_rd4_0782.pdb |
| SEQ ID NO: 2093 | HHH_rd2_0213.pdb |
| SEQ ID NO: 2094 | HHH_rd1_0014.pdb |
| SEQ ID NO: 2095 | HHH_rd4_0569.pdb |
| SEQ ID NO: 2096 | HHH_rd4_0988.pdb |
| SEQ ID NO: 2097 | HHH_rd1_0262.pdb |
| SEQ ID NO: 2098 | HHH_rd4_0321.pdb |
| SEQ ID NO: 2099 | HHH_rd4_0659.pdb |
| SEQ ID NO: 2100 | EEHEE_rd3_0379.pdb |
| SEQ ID NO: 2101 | HHH_rd4_0272.pdb |
| SEQ ID NO: 2102 | EEHEE_rd4_0452.pdb |
| SEQ ID NO: 2103 | EHEE_rd4_0022.pdb |
| SEQ ID NO: 2104 | EHEE_rd2_1159.pdb |
| SEQ ID NO: 2105 | HHH_rd1_0031.pdb |
| SEQ ID NO: 2106 | EHEE_rd4_0778.pdb |
| SEQ ID NO: 2107 | HHH_rd4_0963.pdb |
| SEQ ID NO: 2108 | HHH_rd4_0796.pdb |
| SEQ ID NO: 2109 | EHEE_rd4_0262.pdb |
| SEQ ID NO: 2110 | EEHEE_rd4_0114.pdb |
| SEQ ID NO: 2111 | EHEE_rd2_0836.pdb |
| SEQ ID NO: 2112 | HHH_rd3_0084.pdb |
| SEQ ID NO: 2113 | EHEE_rd4_0161.pdb |
| SEQ ID NO: 2114 | HHH_rd4_0632.pdb |
| SEQ ID NO: 2115 | EHEE_rd2_0416.pdb |
| SEQ ID NO: 2116 | HHH_rd4_0039.pdb |
| SEQ ID NO: 2117 | EHEE_rd4_0264.pdb |
| SEQ ID NO: 2118 | EEHEE_rd4_0965.pdb |
| SEQ ID NO: 2119 | HHH_rd3_0182.pdb |
| SEQ ID NO: 2120 | EEHEE_rd4_0601.pdb |
| SEQ ID NO: 2121 | EEHEE_rd4_0227.pdb |
| SEQ ID NO: 2122 | EHEE_rd4_0247.pdb |
| SEQ ID NO: 2123 | EEHEE_rd4_0168.pdb |
| SEQ ID NO: 2124 | HHH_rd4_0527.pdb |
| SEQ ID NO: 2125 | EHEE_rd4_0163.pdb |
| SEQ ID NO: 2126 | EEHEE_rd4_0326.pdb |
| SEQ ID NO: 2127 | HHH_rd3_0189.pdb |
| SEQ ID NO: 2128 | EHEE_rd4_0890.pdb |
| SEQ ID NO: 2129 | EHEE_rd1_0470.pdb |
| SEQ ID NO: 2130 | EEHEE_rd4_0174.pdb |
| SEQ ID NO: 2131 | EEHEE_rd3_0158.pdb |
| SEQ ID NO: 2132 | HHH_rd4_0541.pdb |
| SEQ ID NO: 2133 | HEEH_rd3_0026.pdb |
| SEQ ID NO: 2134 | EEHEE_rd3_0924.pdb |
| SEQ ID NO: 2135 | HEEH_rd3_1177.pdb |
| SEQ ID NO: 2136 | EEHEE_rd4_p882.pdb |
| SEQ ID NO: 2137 | EEHEE_rd4_0817.pdb |
| SEQ ID NO: 2138 | EHEE_rd2_0995.pdb |
| SEQ ID NO: 2139 | EHEE_rd2_0002.pdb |
| SEQ ID NO: 2140 | HHH_rd1_0008.pdb |
| SEQ ID NO: 2141 | HHH_rd1_0709.pdb |
| SEQ ID NO: 2142 | HHH_rd4_0412.pdb |
| SEQ ID NO: 2143 | EEHEE_rd3_0238.pdb |
| SEQ ID NO: 2144 | HHH_rd4_0150.pdb |
| SEQ ID NO: 2145 | EHEE_rd3_0157.pdb |
| SEQ ID NO: 2146 | HHH_rd4_0073.pdb |
| SEQ ID NO: 2147 | EEHEE_rd4_0741.pdb |
| SEQ ID NO: 2148 | EHEE_rd4_0869.pdb |
| SEQ ID NO: 2149 | HEEH_rd2_1175.pdb |
| SEQ ID NO: 2150 | EEHEE_rd4_0955.pdb |
| SEQ ID NO: 2151 | HHH_rd4_0352.pdb |
| SEQ ID NO: 2152 | HHH_rd4_0750.pdb |
| SEQ ID NO: 2153 | EHEE_rd4_0728.pdb |
| SEQ ID NO: 2154 | HHH_rd3_0245.pdb |
| SEQ ID NO: 2155 | HHH_rd4_0149.pdb |
| SEQ ID NO: 2156 | HHH_rd3_0170.pdb |
| SEQ ID NO: 2157 | EEHEE_rd3_1211.pdb |
| SEQ ID NO: 2158 | EEHEE_rd3_1214.pdb |
| SEQ ID NO: 2159 | EHEE_rd4_0074.pdb |
| SEQ ID NO: 2160 | HHH_rd4_0035.pdb |
| SEQ ID NO: 2161 | HHH_rd4_0448.pdb |
| SEQ ID NO: 2162 | HHH_rd3_0042.pdb |
| SEQ ID NO: 2163 | EEHEE_rd4_0721.pdb |
| SEQ ID NO: 2164 | EEHEE_rd4_0088.pdb |
| SEQ ID NO: 2165 | EEHEE_rd3_1103.pdb |
| SEQ ID NO: 2166 | EEHEE_rd3_0628.pdb |
| SEQ ID NO: 2167 | EEHEE_rd3_1121.pdb |
| SEQ ID NO: 2168 | EEHEE_rd3_0035.pdb |
| SEQ ID NO: 2169 | HHH_rd4_0565.pdb |
| SEQ ID NO: 2170 | EEHEE_rd4_0991.pdb |
| SEQ ID NO: 2171 | EHEE_rd2_0065.pdb |
| SEQ ID NO: 2172 | EEHEE_rd3_0713.pdb |
| SEQ ID NO: 2173 | HEEH_rd3_0707.pdb |
| SEQ ID NO: 2174 | EHEE_rd4_0230.pdb |
| SEQ ID NO: 2175 | HHH_rd1_0236.pdb |
| SEQ ID NO: 2176 | HHH_rd4_0115.pdb |
| SEQ ID NO: 2177 | EEHEE_rd4_0695.pdb |
| SEQ ID NO: 2178 | EEHEE_rd4_0573.pdb |
| SEQ ID NO: 2179 | EHEE_rd4_0447.pdb |
| SEQ ID NO: 2180 | HHH_rd4_0254.pdb |
| SEQ ID NO: 2181 | EEHEE_rd4_0263.pdb |
| SEQ ID NO: 2182 | HHH_rd1_0419.pdb |
| SEQ ID NO: 2183 | HHH_rd4_0440.pdb |
| SEQ ID NO: 2184 | HHH_rd4_0279.pdb |
| SEQ ID NO: 2185 | EHEE_rd1_0411.pdb |
| SEQ ID NO: 2186 | EEHEE_rd3_0232.pdb |
| SEQ ID NO: 2187 | HHH_rd4_0126.pdb |
| SEQ ID NO: 2188 | HHH_rd3_0162.pdb |
| SEQ ID NO: 2189 | EEHEE_rd4_0723.pdb |
| SEQ ID NO: 2190 | EEHEE_rd4_0908.pdb |
| SEQ ID NO: 2191 | EEHEE_rd4_0400.pdb |
| SEQ ID NO: 2192 | HHH_rd4_0457.pdb |
| SEQ ID NO: 2193 | HHH_rd4_0542.pdb |
| SEQ ID NO: 2194 | HHH_rd3_0114.pdb |
| SEQ ID NO: 2195 | EEHEE_rd4_0420.pdb |
| SEQ ID NO: 2196 | EEHEE_rd4_0941.pdb |
| SEQ ID NO: 2197 | EHEE_rd2_0297.pdb |
| SEQ ID NO: 2198 | HHH_rd4_0057.pdb |
| SEQ ID NO: 2199 | EEHEE_rd4_0805.pdb |
| SEQ ID NO: 2200 | EEHEE_rd3_0118.pdb |
| SEQ ID NO: 2201 | EHEE_rd4_0817.pdb |
| SEQ ID NO: 2202 | EEHEE_rd3_1241.pdb |
| SEQ ID NO: 2203 | EEHEE_rd4_0713.pdb |
| SEQ ID NO: 2204 | HHH_rd3_0178.pdb |
| SEQ ID NO: 2205 | HHH_rd3_0139.pdb |
| SEQ ID NO: 2206 | EEHEE_rd3_0249.pdb |
| SEQ ID NO: 2207 | EEHEE_rd4_0824.pdb |
| SEQ ID NO: 2208 | EEHEE_rd4_0680.pdb |
| SEQ ID NO: 2209 | EEHEE_rd3_0689.pdb |
| SEQ ID NO: 2210 | EHEE_rd4_0795.pdb |
| SEQ ID NO: 2211 | HHH_rd4_0516.pdb |
| SEQ ID NO: 2212 | HHH_rd4_0577.pdb |
| SEQ ID NO: 2213 | EHEE_rd3_0145.pdb |
| SEQ ID NO: 2214 | EEHEE_rd3_0761.pdb |
| SEQ ID NO: 2215 | HHH_rd1_0261.pdb |
| SEQ ID NO: 2216 | HEEH_rd4_0156.pdb |
| SEQ ID NO: 2217 | EEHEE_rd4_0544.pdb |
| SEQ ID NO: 2218 | EHEE_rd3_0115.pdb |
| SEQ ID NO: 2219 | EEHEE_rd3_1362.pdb |
| SEQ ID NO: 2220 | HHH_rd4_0407.pdb |
| SEQ ID NO: 2221 | EEHEE_rd3_1490.pdb |
| SEQ ID NO: 2222 | HHH_rd3_0043.pdb |
| SEQ ID NO: 2223 | EHEE_rd3_0140.pdb |
| SEQ ID NO: 2224 | HEEH_rd3_0665.pdb |
| SEQ ID NO: 2225 | HHH_rd2_0185.pdb |
| SEQ ID NO: 2226 | HHH_rd1_0029.pdb |
| SEQ ID NO: 2227 | EHEE_rd4_0014.pdb |
| SEQ ID NO: 2228 | HHH_rd2_0043.pdb |
| SEQ ID NO: 2229 | EEHEE_rd4_0629.pdb |
| SEQ ID NO: 2230 | EEHEE_rd3_1415.pdb |
| SEQ ID NO: 2231 | HEEH_rd3_1123.pdb |
| SEQ ID NO: 2232 | HHH_rd4_0764.pdb |
| SEQ ID NO: 2233 | HHH_rd2_0233.pdb |
| SEQ ID NO: 2234 | HHH_rd4_0319.pdb |
| SEQ ID NO: 2235 | HHH_rd4_0641.pdb |
| SEQ ID NO: 2236 | HHH_rd2_0020.pdb |
| SEQ ID NO: 2237 | HHH_rd4_0639.pdb |
| SEQ ID NO: 2238 | HEEH_rd3_0872.pdb |
| SEQ ID NO: 2239 | HHH_rd4_0635.pdb |
| SEQ ID NO: 2240 | HHH_rd4_0888.pdb |
| SEQ ID NO: 2241 | EHEE_rd1_0439.pdb |
| SEQ ID NO: 2242 | EEHEE_rd4_0243.pdb |
| SEQ ID NO: 2243 | EEHEE_rd3_0542.pdb |
| SEQ ID NO: 2244 | EEHEE_rd4_0685.pdb |
| SEQ ID NO: 2245 | EEHEE_rd4_0252.pdb |
| SEQ ID NO: 2246 | EEHEE_rd3_0285.pdb |
| SEQ ID NO: 2247 | EHEE_rd4_0998.pdb |
| SEQ ID NO: 2248 | EEHEE_rd4_0994.pdb |
| SEQ ID NO: 2249 | EEHEE_rd4_1000.pdb |
| SEQ ID NO: 2250 | EHEE_rd4_0001.pdb |
| SEQ ID NO: 2251 | HHH_rd4_0927.pdb |
| SEQ ID NO: 2252 | EEHEE_rd4_0701.pdb |
| SEQ ID NO: 2253 | EEHEE_rd4_0632.pdb |
| SEQ ID NO: 2254 | HHH_rd4_0913.pdb |
| SEQ ID NO: 2255 | EHEE_rd4_0971.pdb |
| SEQ ID NO: 2256 | EHEE_rd4_0020.pdb |
| SEQ ID NO: 2257 | EEHEE_rd3_0687.pdb |
| SEQ ID NO: 2258 | EHEE_rd2_0092.pdb |
| SEQ ID NO: 2259 | EHEE_rd4_0887.pdb |
| SEQ ID NO: 2260 | EHEE_rd4_0024.pdb |
| SEQ ID NO: 2261 | EHEE_rd3_0058.pdb |
| SEQ ID NO: 2262 | EEHEE_rd4_0596.pdb |
| SEQ ID NO: 2263 | HHH_rd4_0573.pdb |
| SEQ ID NO: 2264 | HHH_rd4_0675.pdb |
| SEQ ID NO: 2265 | EEHEE_rd4_0492.pdb |
| SEQ ID NO: 2266 | EEHEE_rd4_0332.pdb |
| SEQ ID NO: 2267 | HHH_rd4_0392.pdb |
| SEQ ID NO: 2268 | EHEE_rd4_0123.pdb |
| SEQ ID NO: 2269 | EEHEE_rd3_0755.pdb |
| SEQ ID NO: 2270 | EEHEE_rd4_0217.pdb |
| SEQ ID NO: 2271 | HHH_rd4_0032.pdb |
| SEQ ID NO: 2272 | EHEE_rd4_0486.pdb |
| SEQ ID NO: 2273 | EHEE_rd1_0350.pdb |
| SEQ ID NO: 2274 | EEHEE_rd4_0771.pdb |
| SEQ ID NO: 2275 | HHH_rd3_0118.pdb |
| SEQ ID NO: 2276 | HHH_rd2_0244.pdb |
| SEQ ID NO: 2277 | EEHEE_rd3_0608.pdb |
| SEQ ID NO: 2278 | HHH_rd4_0112.pdb |
| SEQ ID NO: 2279 | EHEE_rd3_0146.pdb |
| SEQ ID NO: 2280 | EHEE_rd4_0259.pdb |
| SEQ ID NO: 2281 | EEHEE_rd3_0910.pdb |
| SEQ ID NO: 2282 | EHEE_rd3_0067.pdb |
| SEQ ID NO: 2283 | EEHEE_rd4_0508.pdb |
| SEQ ID NO: 2284 | EEHEE_rd4_0502.pdb |
| SEQ ID NO: 2285 | EHEE_rd4_0824.pdb |
| SEQ ID NO: 2286 | EEHEE_rd3_1224.pdb |
| SEQ ID NO: 2287 | EEHEE_rd4_0416.pdb |
| SEQ ID NO: 2288 | EEHEE_rd3_0482.pdb |
| SEQ ID NO: 2289 | HHH_rd4_0294.pdb |
| SEQ ID NO: 2290 | EHEE_rd4_0237.pdb |
| SEQ ID NO: 2291 | EHEE_rd4_0730.pdb |
| SEQ ID NO: 2292 | EEHEE_rd4_0579.pdb |
| SEQ ID NO: 2293 | EEHEE_rd4_0111.pdb |
| SEQ ID NO: 2294 | HHH_rd1_0786.pdb |
| SEQ ID NO: 2295 | EEHEE_rd3_0037.pdb |
| SEQ ID NO: 2296 | HHH_rd4_0459.pdb |
| SEQ ID NO: 2297 | EEHEE_rd4_0101.pdb |
| SEQ ID NO: 2298 | EEHEE_rd4_0422.pdb |
| SEQ ID NO: 2299 | HEEH_rd4_0296.pdb |
| SEQ ID NO: 2300 | HHH_rd2_0022.pdb |
| SEQ ID NO: 2301 | HEEH_rd3_0712.pdb |
| SEQ ID NO: 2302 | EHEE_rd2_0020.pdb |
| SEQ ID NO: 2303 | EEHEE_rd4_0105.pdb |
| SEQ ID NO: 2304 | HHH_rd1_0565.pdb |
| SEQ ID NO: 2305 | HEEH_rd3_0066.pdb |
| SEQ ID NO: 2306 | EHEE_rd2_0867.pdb |
| SEQ ID NO: 2307 | EHEE_rd4_0481.pdb |
| SEQ ID NO: 2308 | EEHEE_rd3_0935.pdb |
| SEQ ID NO: 2309 | EEHEE_rd3_0701.pdb |
| SEQ ID NO: 2310 | HHH_rd2_0157.pdb |
| SEQ ID NO: 2311 | EHEE_rd4_0476.pdb |
| SEQ ID NO: 2312 | HHH_rd3_0154.pdb |
| SEQ ID NO: 2313 | HHH_rd3_0028.pdb |
| SEQ ID NO: 2314 | EEHEE_rd4_0414.pdb |
| SEQ ID NO: 2315 | EHEE_rd4_0820.pdb |
| SEQ ID NO: 2316 | HHH_rd1_0012.pdb |
| SEQ ID NO: 2317 | EEHEE_rd4_0826.pdb |
| SEQ ID NO: 2318 | EEHEE_rd4_0522.pdb |
| SEQ ID NO: 2319 | HEEH_rd3_0094.pdb |
| SEQ ID NO: 2320 | EEHEE_rd3_1461.pdb |
| SEQ ID NO: 2321 | EEHEE_rd3_0699.pdb |
| SEQ ID NO: 2322 | EEHEE_rd4_0136.pdb |
| SEQ ID NO: 2323 | EEHEE_rd4_0188.pdb |
| SEQ ID NO: 2324 | EHEE_rd4_0672.pdb |
| SEQ ID NO: 2325 | EEHEE_rd4_0996.pdb |
| SEQ ID NO: 2326 | EHEE_rd4_0075.pdb |
| SEQ ID NO: 2327 | EHEE_rd4_0581.pdb |
| SEQ ID NO: 2328 | HHH_rd4_0589.pdb |
| SEQ ID NO: 2329 | EEHEE_rd4_0659.pdb |
| SEQ ID NO: 2330 | HHH_rd1_0164.pdb |
| SEQ ID NO: 2331 | HHH_rd4_0789.pdb |
| SEQ ID NO: 2332 | EEHEE_rd4_0339.pdb |
| SEQ ID NO: 2333 | HHH_rd4_0312.pdb |
| SEQ ID NO: 2334 | EHEE_rd4_0216.pdb |
| SEQ ID NO: 2335 | HHH_rd1_0188.pdb |
| SEQ ID NO: 2336 | EHEE_rd4_0067.pdb |
| SEQ ID NO: 2337 | EEHEE_rd4_0602.pdb |
| SEQ ID NO: 2338 | EEHEE_rd4_0716.pdb |
| SEQ ID NO: 2339 | HHH_rd3_0019.pdb |
| SEQ ID NO: 2340 | EHEE_rd4_0026.pdb |
| SEQ ID NO: 2341 | EHEE_rd4_0827.pdb |
| SEQ ID NO: 2342 | EHEE_rd3_0009.pdb |
| SEQ ID NO: 2343 | HHH_rd1_0888.pdb |
| SEQ ID NO: 2344 | HEEH_rd4_0930.pdb |
| SEQ ID NO: 2345 | EHEE_rd2_0942.pdb |
| SEQ ID NO: 2346 | EHEE_rd2_0088.pdb |
| SEQ ID NO: 2347 | EEHEE_rd3_1489.pdb |
| SEQ ID NO: 2348 | EHEE_rd2_1026.pdb |
| SEQ ID NO: 2349 | EEHEE_rd3_0879.pdb |
| SEQ ID NO: 2350 | EEHEE_rd4_0195.pdb |
| SEQ ID NO: 2351 | EHEE_rd4_0357.pdb |
| SEQ ID NO: 2352 | EEHEE_rd3_0956.pdb |
| SEQ ID NO: 2353 | HHH_rd4_0772.pdb |
| SEQ ID NO: 2354 | HHH_rd1_0105.pdb |
| SEQ ID NO: 2355 | EEHEE_rd3_0179.pdb |
| SEQ ID NO: 2356 | EEHEE_rd3_0809.pdb |
| SEQ ID NO: 2357 | HHH_rd4_0316.pdb |
| SEQ ID NO: 2358 | EEHEE_rd4_0169.pdb |
| SEQ ID NO: 2359 | HHH_rd4_0680.pdb |
| SEQ ID NO: 2360 | HHH_rd4_0469.pdb |
| SEQ ID NO: 2361 | HHH_rd1_0361.pdb |
| SEQ ID NO: 2362 | HHH_rd4_0634.pdb |
| SEQ ID NO: 2363 | EEHEE_rd4_0134.pdb |
| SEQ ID NO: 2364 | EEHEE_rd3_0541.pdb |
| SEQ ID NO: 2365 | EHEE_rd4_0422.pdb |
| SEQ ID NO: 2366 | EEHEE_rd4_0151.pdb |
| SEQ ID NO: 2367 | EEHEE_rd4_0424.pdb |
| SEQ ID NO: 2368 | HHH_rd4_0624.pdb |
| SEQ ID NO: 2369 | EEHEE_rd4_0382.pdb |
| SEQ ID NO: 2370 | EEHEE_rd4_0472.pdb |
| SEQ ID NO: 2371 | HHH_rd1_0389.pdb |
| SEQ ID NO: 2372 | EEHEE_rd4_0261.pdb |
| SEQ ID NO: 2373 | HHH_rd1_0739.pdb |
| SEQ ID NO: 2374 | EEHEE_rd4_0129.pdb |
| SEQ ID NO: 2375 | EEHEE_rd4_0960.pdb |
| SEQ ID NO: 2376 | EEHEE_rd4_0179.pdb |
| SEQ ID NO: 2377 | EEHEE_rd3_0555.pdb |
| SEQ ID NO: 2378 | EEHEE_rd3_0782.pdb |
| SEQ ID NO: 2379 | EEHEE_rd4_0118.pdb |
| SEQ ID NO: 2380 | EEHEE_rd4_0540.pdb |
| SEQ ID NO: 2381 | EEHEE_rd4_0202.pdb |
| SEQ ID NO: 2382 | HHH_rd4_0952.pdb |
| SEQ ID NO: 2383 | HEEH_rd2_0771.pdb |
| SEQ ID NO: 2384 | HEEH_rd3_1449.pdb |
| SEQ ID NO: 2385 | HHH_rd1_0241.pdb |
| SEQ ID NO: 2386 | EEHEE_rd4_0755.pdb |
| SEQ ID NO: 2387 | EHEE_rd4_0861.pdb |
| SEQ ID NO: 2388 | EEHEE_rd4_0270.pdb |
| SEQ ID NO: 2389 | EEHEE_rd4_0058.pdb |
| SEQ ID NO: 2390 | HHH_rd2_0103.pdb |
| SEQ ID NO: 2391 | HHH_rd4_0517.pdb |
| SEQ ID NO: 2392 | EEHEE_rd4_0124.pdb |
| SEQ ID NO: 2393 | EEHEE_rd4_0792.pdb |
| SEQ ID NO: 2394 | EEHEE_rd4_0207.pdb |
| SEQ ID NO: 2395 | HEEH_rd3_0013.pdb |
| SEQ ID NO: 2396 | EEHEE_rd3_0358.pdb |
| SEQ ID NO: 2397 | EEHEE_rd4_0089.pdb |
| SEQ ID NO: 2398 | HHH_rd3_0237.pdb |
| SEQ ID NO: 2399 | HHH_rd4_0470.pdb |
| SEQ ID NO: 2400 | HHH_rd2_0033.pdb |
| SEQ ID NO: 2401 | EHEE_rd4_0159.pdb |
| SEQ ID NO: 2402 | HHH_rd4_0647.pdb |
| SEQ ID NO: 2403 | HHH_rd4_0795.pdb |
| SEQ ID NO: 2404 | EHEE_rd4_0697.pdb |
| SEQ ID NO: 2405 | EEHEE_rd4_0658.pdb |
| SEQ ID NO: 2406 | EEHEE_rd4_0276.pdb |
| SEQ ID NO: 2407 | HHH_rd4_0385.pdb |
| SEQ ID NO: 2408 | HHH_rd4_0366.pdb |
| SEQ ID NO: 2409 | EEHEE_rd4_0822.pdb |
| SEQ ID NO: 2410 | EEHEE_rd3_1638.pdb |
| SEQ ID NO: 2411 | HHH_rd1_0356.pdb |
| SEQ ID NO: 2412 | EEHEE_rd3_1485.pdb |
| SEQ ID NO: 2413 | EHEE_rd4_0437.pdb |
| SEQ ID NO: 2414 | EEHEE_rd3_0596.pdb |
| SEQ ID NO: 2415 | HHH_rd1_0181.pdb |
| SEQ ID NO: 2416 | HHH_rd1_0941.pdb |
| SEQ ID NO: 2417 | EEHEE_rd4_0465.pdb |
| SEQ ID NO: 2418 | EEHEE_rd3_0288.pdb |
| SEQ ID NO: 2419 | HHH_rd4_0199.pdb |
| SEQ ID NO: 2420 | EHEE_rd4_0502.pdb |
| SEQ ID NO: 2421 | EEHEE_rd3_0080.pdb |
| SEQ ID NO: 2422 | EEHEE_rd3_0281.pdb |
| SEQ ID NO: 2423 | EHEE_rd2_0055.pdb |
| SEQ ID NO: 2424 | EHEE_rd4_0465.pdb |
| SEQ ID NO: 2425 | HHH_rd1_0169.pdb |
| SEQ ID NO: 2426 | EHEE_rd4_0955.pdb |
| SEQ ID NO: 2427 | HHH_rd4_0824.pdb |
| SEQ ID NO: 2428 | HEEH_rd4_0054.pdb |
| SEQ ID NO: 2429 | EEHEE_rd4_0130.pdb |
| SEQ ID NO: 2430 | HHH_rd4_0762.pdb |
| SEQ ID NO: 2431 | HHH_rd4_0657.p8b |
| SEQ ID NO: 2432 | EEHEE_rd4_0053.pdb |
| SEQ ID NO: 2433 | EEHEE_rd3_0901.pdb |
| SEQ ID NO: 2434 | HEEH_rd4_0649.pdb |
| SEQ ID NO: 2435 | EHEE_rd2_1197.pdb |
| SEQ ID NO: 2436 | HHH_rd4_0379.pdb |
| SEQ ID NO: 2437 | EEHEE_rd3_0007.pdb |
| SEQ ID NO: 2438 | EEHEE_rd4_0454.pdb |
| SEQ ID NO: 2439 | EEHEE_rd4_0091.pdb |
| SEQ ID NO: 2440 | HHH_rd4_0511.pdb |
| SEQ ID NO: 2441 | EHEE_rd4_0358.pdb |
| SEQ ID NO: 2442 | EHEE_rd3_0214.pdb |
| SEQ ID NO: 2443 | EEHEE_rd4_0289.pdb |
| SEQ ID NO: 2444 | EEHEE_rd3_0161.pdb |
| SEQ ID NO: 2445 | EHEE_rd2_0148.pdb |
| SEQ ID NO: 2446 | HHH_rd4_0898.pdb |
| SEQ ID NO: 2447 | HEEH_rd2_0779.pdb |
| SEQ ID NO: 2448 | EHEE_rd4_0723.pdb |
| SEQ ID NO: 2449 | EHEE_rd2_0480.pdb |
| SEQ ID NO: 2450 | HHH_rd4_0114.pdb |
| SEQ ID NO: 2451 | EEHEE_rd4_0766.pdb |
| SEQ ID NO: 2452 | EEHEE_rd4_0096.pdb |
| SEQ ID NO: 2453 | HHH_rd4_0493.pdb |
| SEQ ID NO: 2454 | EHEE_rd4_0057.pdb |
| SEQ ID NO: 2455 | EEHEE_rd4_0956.pdb |
| SEQ ID NO: 2456 | EHEE_rd4_0148.pdb |
| SEQ ID NO: 2457 | EEHEE_rd4_0379.pdb |
| SEQ ID NO: 2458 | HHH_rd3_0191.pdb |
| SEQ ID NO: 2459 | EHEE_rd4_0153.pdb |
| SEQ ID NO: 2460 | HHH_rd1_0113.pdb |
| SEQ ID NO: 2461 | EEHEE_rd4_0478.pdb |
| SEQ ID NO: 2462 | EHEE_rd4_0896.pdb |
| SEQ ID NO: 2463 | HHH_rd4_0426.pdb |
| SEQ ID NO: 2464 | EEHEE_rd3_0033.pdb |
| SEQ ID NO: 2465 | EHEE_rd4_0922.pdb |
| SEQ ID NO: 2466 | EEHEE_rd3_0254.pdb |
| SEQ ID NO: 2467 | EEHEE_rd3_0244.pdb |
| SEQ ID NO: 2468 | EEHEE_rd4_0145.pdb |
| SEQ ID NO: 2469 | EEHEE_rd4_0315.pdb |
| SEQ ID NO: 2470 | HHH_rd4_0989.pdb |
| SEQ ID NO: 2471 | EEHEE_rd4_0839.pdb |
| SEQ ID NO: 2472 | EHEE_rd2_0025.pdb |
| SEQ ID NO: 2473 | EHEE_rd2_0247.pdb |
| SEQ ID NO: 2474 | EEHEE_rd4_0542.pdb |
| SEQ ID NO: 2475 | EHEE_rd4_0207.pdb |
| SEQ ID NO: 2476 | HHH_rd1_0268.pdb |
| SEQ ID NO: 2477 | HHH_rd1_0144.pdb |
| SEQ ID NO: 2478 | EEHEE_rd4_0200.pdb |
| SEQ ID NO: 2479 | EEHEE_rd4_0199.pdb |
| SEQ ID NO: 2480 | EEHEE_rd3_1603.pdb |
| SEQ ID NO: 2481 | EEHEE_rd3_0561.pdb |
| SEQ ID NO: 2482 | EHE_rd4_0587.pdb |
| SEQ ID NO: 2483 | HHH_rd1_0584.pdb |
| SEQ ID NO: 2484 | EEHEE_rd4_0319.pdb |
| SEQ ID NO: 2485 | EHEE_rd4_0226.pdb |
| SEQ ID NO: 2486 | EEHEE_rd4_0793.pdb |
| SEQ ID NO: 2487 | EHEE_rd4_0549.pdb |
| SEQ ID NO: 2488 | EEHEE_rd4_0313.pdb |
| SEQ ID NO: 2489 | EHEE_rd4_0806.pdb |
| SEQ ID NO: 2490 | HHH_rd4_0967.pdb |
| SEQ ID NO: 2491 | EHEE_rd4_0600.pdb |
| SEQ ID NO: 2492 | EHEE_rd4_0085.pdb |
| SEQ ID NO: 2493 | HEEH_rd2_0163.pdb |
| SEQ ID NO: 2494 | EHEE_rd4_0748.pdb |
| SEQ ID NO: 2495 | EEHEE_rd4_0782.pdb |
| SEQ ID NO: 2496 | EEHEE_rd4_0466.pdb |
| SEQ ID NO: 2497 | EEHEE_rd3_1480.pdb |
| SEQ ID NO: 2498 | HHH_rd1_0949.pdb |
| SEQ ID NO: 2499 | EEHEE_rd3_1590.pdb |
| SEQ ID NO: 2500 | EEHEE_rd4_0040.pdb |
| SEQ ID NO: 2501 | HHH_rd4_0623.pdb |
| SEQ ID NO: 2502 | EEHEE_rd4_0073.pdb |
| SEQ ID NO: 2503 | EHEE_rd4_0864.pdb |
| SEQ ID NO: 2504 | EHEE_rd4_0852.pdb |
| SEQ ID NO: 2505 | EEHEE_rd4_0513.pdb |
| SEQ ID NO: 2506 | HHH_rd1_0374.pdb |
| SEQ ID NO: 2507 | HHH_rd4_0668.pdb |
| SEQ ID NO: 2508 | EHEE_rd4_0543.pdb |
| SEQ ID NO: 2509 | EHEE_rd4_0729.pdb |
| SEQ ID NO: 2510 | EEHEE_rd4_0813.pdb |
| SEQ ID NO: 2511 | EHEE_rd4_0113.pdb |
| SEQ ID NO: 2512 | HHH_rd4_0501.pdb |
| SEQ ID NO: 2513 | EEHEE_rd4_0127.pdb |
| SEQ ID NO: 2514 | EEHEE_rd3_1263.pdb |
| SEQ ID NO: 2515 | EEHEE_rd4_0541.pdb |
| SEQ ID NO: 2516 | EHEE_rd4_0752.pdb |
| SEQ ID NO: 2517 | EEHEE_rd4_0110.pdb |
| SEQ ID NO: 2518 | EHEE_rd4_0019.pdb |
| SEQ ID NO: 2519 | HEEH_rd4_0109.pdb |
| SEQ ID NO: 2520 | EHEE_rd4_0936.pdb |
| SEQ ID NO: 2521 | EHEE_rd2_0936.pdb |
| SEQ ID NO: 2522 | EEHEE_rd3_0353.pdb |
| SEQ ID NO: 2523 | EEHEE_rd4_0085.pdb |
| SEQ ID NO: 2524 | HHH_rd4_0376.pdb |
| SEQ ID NO: 2525 | EHEE_rd4_0426.pdb |
| SEQ ID NO: 2526 | HHH_rd4_0441.pdb |
| SEQ ID NO: 2527 | HHH_rd4_0104.pdb |
| SEQ ID NO: 2528 | EEHEE_rd3_1677.pdb |
| SEQ ID NO: 2529 | EEHEE_rd4_0324.pdb |
| SEQ ID NO: 2530 | EEHEE_rd3_1700.pdb |
| SEQ ID NO: 2531 | EEHEE_rd3_0337.pdb |
| SEQ ID NO: 2532 | HHH_rd4_0380.pdb |
| SEQ ID NO: 2533 | HHH_rd4_0106.pdb |
| SEQ ID NO: 2534 | HHH_rd4_0256.pdb |
| SEQ ID NO: 2535 | EHEE_rd4_0401.pdb |
| SEQ ID NO: 2536 | HHH_rd2_0171.pdb |
| SEQ ID NO: 2537 | EEHEE_rd4_0729.pdb |
| SEQ ID NO: 2538 | HHH_rd2_0029.pdb |
| SEQ ID NO: 2539 | EHEE_rd4_0059.pdb |
| SEQ ID NO: 2540 | EHEE_rd4_0056.pdb |
| SEQ ID NO: 2541 | HHH_rd4_0781.pdb |
| SEQ ID NO: 2542 | EEHEE_rd4_0585.pdb |
| SEQ ID NO: 2543 | EHEE_rd4_0472.pdb |
| SEQ ID NO: 2544 | EEHEE_rd4_0280.pdb |
| SEQ ID NO: 2545 | EEHEE_rd4_0230.pdb |
| SEQ ID NO: 2546 | HHH_rd1_0165.pdb |
| SEQ ID NO: 2547 | EEHEE_rd4_0218.pdb |
| SEQ ID NO: 2548 | EEHEE_rd4_0427.pdb |
| SEQ ID NO: 2549 | EEHEE_rd4_0710.pdb |
| SEQ ID NO: 2550 | EEHEE_rd3_1455.pdb |
| SEQ ID NO: 2551 | EEHEE_rd4_0683.pdb |
| SEQ ID NO: 2552 | EHEE_rd4_0625.pdb |
| SEQ ID NO: 2553 | EHEE_rd4_0129.pdb |
| SEQ ID NO: 2554 | EEHEE_rd4_0357.pdb |
| SEQ ID NO: 2555 | EEHEE_rd4_0442.pdb |
| SEQ ID NO: 2556 | HHH_rd4_0435.pdb |
| SEQ ID NO: 2557 | EEHEE_rd4_0469.pdb |
| SEQ ID NO: 2558 | HEEH_rd4_0398.pdb |
| SEQ ID NO: 2559 | EEHEE_rd3_1731.pdb |
| SEQ ID NO: 2560 | EHEE_rd4_0816.pdb |
| SEQ ID NO: 2561 | HHH_rd3_0134.pdb |
| SEQ ID NO: 2562 | EHEE_rd4_0408.pdb |
| SEQ ID NO: 2563 | HHH_rd1_0275.pdb |
| SEQ ID NO: 2564 | EEHEE_rd3_1196.pdb |
| SEQ ID NO: 2565 | HHH_rd4_0978.pdb |
| SEQ ID NO: 2566 | EEHEE_rd3_0592.pdb |
| SEQ ID NO: 2567 | HHH_rd2_0006.pdb |
| SEQ ID NO: 2568 | EHEE_rd3_0223.pdb |
| SEQ ID NO: 2569 | EEHEE_rd3_0313.pdb |
| SEQ ID NO: 2570 | EEHEE_rd3_1336.pdb |
| SEQ ID NO: 2571 | HHH_rd1_0773.pdb |
| SEQ ID NO: 2572 | EHEE_rd2_0920.pdb |
| SEQ ID NO: 2573 | EHEE_rd4_0649.pdb |
| SEQ ID NO: 2574 | EHEE_rd4_0231.pdb |
| SEQ ID NO: 2575 | EEHEE_rd4_0661.pdb |
| SEQ ID NO: 2576 | HHH_rd4_0751.pdb |
| SEQ ID NO: 2577 | EHEE_rd2_0983.pdb |
| SEQ ID NO: 2578 | EHEE_rd2_0450.pdb |
| SEQ ID NO: 2579 | EHEE_rd4_0633.pdb |
| SEQ ID NO: 2580 | EEHEE_rd3_0135.pdb |
| SEQ ID NO: 2581 | EEHEE_rd3_1072.pdb |
| SEQ ID NO: 2582 | HHH_rd1_0863.pdb |
| SEQ ID NO: 2583 | EEHEE_rd4_0510.pdb |
| SEQ ID NO: 2584 | EEHEE_rd4_0585.pdb |
| SEQ ID NO: 2585 | EHEE_rd4_0310.pdb |
| SEQ ID NO: 2586 | EEHEE_rd3_0003.pdb |
| SEQ ID NO: 2587 | HHH_rd3_0202.pdb |
| SEQ ID NO: 2588 | HEEH_rd3_1573.pdb |
| SEQ ID NO: 2589 | EEHEE_rd3_0803.pdb |
| SEQ ID NO: 2590 | EHEE_rd4_0236.pdb |
| SEQ ID NO: 2591 | EHEE_rd4_0217.pdb |
| SEQ ID NO: 2592 | EHEE_rd4_0302.pdb |
| SEQ ID NO: 2593 | EHEE_rd4_0345.pdb |
| SEQ ID NO: 2594 | HHH_rd1_0121.pdb |
| SEQ ID NO: 2595 | HEEH_rd3_1183.pdb |
| SEQ ID NO: 2596 | EEHEE_rd4_0299.pdb |
| SEQ ID NO: 2597 | EEHEE_rd4_0524.pdb |
| SEQ ID NO: 2598 | HHH_rd1_0489.pdb |
| SEQ ID NO: 2599 | EEHEE_rd3_1158.pdb |
| SEQ ID NO: 2600 | HHH_rd1_0982.pdb |
| SEQ ID NO: 2601 | EEHEE_rd3_1803.pdb |
| SEQ ID NO: 2602 | EHEE_rd4_0133.pdb |
| SEQ ID NO: 2603 | EHEE_rd2_1118.pdb |
| SEQ ID NO: 2604 | HHH_rd4_0949.pdb |
| SEQ ID NO: 2605 | EHEE_rd4_0859.pdb |
| SEQ ID NO: 2606 | EEHEE_rd4_0083.pdb |
| SEQ ID NO: 2607 | HEEH_rd3_1011.pdb |
| SEQ ID NO: 2608 | EEHEE_rd3_0435.pdb |
| SEQ ID NO: 2609 | EHEE_rd2_0183.pdb |
| SEQ ID NO: 2610 | EEHEE_rd3_0865.pdb |
| SEQ ID NO: 2611 | EHEE_rd2_0086.pdb |
| SEQ ID NO: 2612 | HHH_rd4_0119.pdb |
| SEQ ID NO: 2613 | HHH_rd4_0607.pdb |
| SEQ ID NO: 2614 | HHH_rd4_0598.pdb |
| SEQ ID NO: 2615 | EEHEE_rd4_0523.pdb |
| SEQ ID NO: 2616 | EEHEE_rd4_0288.pdb |
| SEQ ID NO: 2617 | HHH_rd4_0026.pdb |
| SEQ ID NO: 2618 | HHH_rd4_0555.pdb |
| SEQ ID NO: 2619 | EEHEE_rd3_0801.pdb |
| SEQ ID NO: 2620 | HHH_rd1_0417.pdb |
| SEQ ID NO: 2621 | EHEE_rd4_0905.pdb |
| SEQ ID NO: 2622 | EEHEE_rd3_1141.pdb |
| SEQ ID NO: 2623 | EHEE_rd3_0234.pdb |
| SEQ ID NO: 2624 | HEEH_rd3_0435.pdb |
| SEQ ID NO: 2625 | EEHEE_rd3_0417.pdb |
| SEQ ID NO: 2626 | HHH_rd4_0105.pdb |
| SEQ ID NO: 2627 | HNH_rd3_0131.pdb |
| SEQ ID NO: 2628 | EEHEE_rd4_0599.pdb |
| SEQ ID NO: 2629 | EEHEE_rd4_0608.pdb |
| SEQ ID NO: 2630 | HHH_rd1_0471.pdb |
| SEQ ID NO: 2631 | EEHEE_rd4_0756.pdb |
| SEQ ID NO: 2632 | HHH_rd4_0246.pdb |
| SEQ ID NO: 2633 | EEHEE_rd3_1246.pdb |
| SEQ ID NO: 2634 | EEHEE_rd4_0117.pdb |
| SEQ ID NO: 2635 | EEHEE_rd3_1113.pdb |
| SEQ ID NO: 2636 | EHEE_rd4_0438.pdb |
| SEQ ID NO: 2637 | HHH_rd1_0354.pdb |
| SEQ ID NO: 2638 | EEHEE_rd4_0861.pdb |
| SEQ ID NO: 2639 | EEHEE_rd4_0655.pdb |
| SEQ ID NO: 2640 | EHEE_rd4_0179.pdb |
| SEQ ID NO: 2641 | EEHEE_rd4_0425.pdb |
| SEQ ID NO: 2642 | HHH_rd1_0325.pdb |
| SEQ ID NO: 2643 | EHEE_rd4_0886.pdb |
| SEQ ID NO: 2644 | EHEE_rd2_1151.pdb |
| SEQ ID NO: 2645 | EEHEE_rd3_0895.pdb |
| SEQ ID NO: 2646 | EEHEE_rd4_0377.pdb |
| SEQ ID NO: 2647 | HEEH_rd3_0821.pdb |
| SEQ ID NO: 2648 | EEHEE_rd3_1445.pdb |
| SEQ ID NO: 2649 | HHH_rd1_0299.pdb |
| SEQ ID NO: 2650 | HHH_rd4_0604.pdb |
| SEQ ID NO: 2651 | EHEE_rd4_0550.pdb |
| SEQ ID NO: 2652 | EHEE_rd4_0201.pdb |
| SEQ ID NO: 2653 | HEEH_rd3_0127.pdb |
| SEQ ID NO: 2654 | EHEE_rd3_0005.pdb |
| SEQ ID NO: 2655 | HHH_rd1_0323.pdb |
| SEQ ID NO: 2656 | EEHEE_rd4_0158.pdb |
| SEQ ID NO: 2657 | HHH_rd4_0464.pdb |
| SEQ ID NO: 2658 | EHEE_rd4_0171.pdb |
| SEQ ID NO: 2659 | EHEE_rd2_p650.pdb |
| SEQ ID NO: 2660 | EHEE_rd2_0585.pdb |
| SEQ ID NO: 2661 | EEHEE_rd4_0611.pdb |
| SEQ ID NO: 2662 | EEHEE_rd4_0613.pdb |
| SEQ ID NO: 2663 | EEHEE_rd4_0052.pdb |
| SEQ ID NO: 2664 | HHH_rd3_0241.pdb |
| SEQ ID NO: 2665 | EEHEE_rd4_0432.pdb |
| SEQ ID NO: 2666 | EEHEE_rd3_0489.pdb |
| SEQ ID NO: 2667 | EEHEE_rd3_0260.pdb |
| SEQ ID NO: 2668 | HHH_rd4_0059.pdb |
| SEQ ID NO: 2669 | HHH_rd1_0005.pdb |
| SEQ ID NO: 2670 | HHH_rd1_0104.pdb |
| SEQ ID NO: 2671 | EEHEE_rd4_0924.pdb |
| SEQ ID NO: 2672 | HHH_rd4_0891.pdb |
| SEQ ID NO: 2673 | HHH_rd4_0078.pdb |
| SEQ ID NO: 2674 | HHH_rd4_0156.pdb |
| SEQ ID NO: 2675 | HHH_rd4_0942.pdb |
| SEQ ID NO: 2676 | HHH_rd4_0932.pdb |
| SEQ ID NO: 2677 | EEHEE_rd4_0871.pdb |
| SEQ ID NO: 2678 | EHEE_rd4_0754.pdb |
| SEQ ID NO: 2679 | HHH_rd1_0108.pdb |
| SEQ ID NO: 2680 | EHEE_rd4_0684.pdb |
| SEQ ID NO: 2681 | EEHEE_rd4_0736.pdb |
| SEQ ID NO: 2682 | HHH_rd4_0497.pdb |
| SEQ ID NO: 2683 | EEHEE_rd3_0132.pdb |
| SEQ ID NO: 2684 | EHEE_rd2_0336.pdb |
| SEQ ID NO: 2685 | EHEE_rd2_0763.pdb |
| SEQ ID NO: 2686 | EEHEE_rd3_0096.pdb |
| SEQ ID NO: 2687 | EEHEE_rd4_0988.pdb |
| SEQ ID NO: 2688 | HHH_rd3_0152.pdb |
| SEQ ID NO: 2689 | EEHEE_rd4_0978.pdb |
| SEQ ID NO: 2690 | EEHEE_rd4_0323.pdb |
| SEQ ID NO: 2691 | EHEE_rd4_0658.pdb |
| SEQ ID NO: 2692 | EEHEE_rd3_1377.pdb |
| SEQ ID NO: 2693 | HHH_rd1_0716.pdb |
| SEQ ID NO: 2694 | HHH_rd1_0127.pdb |
| SEQ ID NO: 2695 | EHEE_rd2_0438.pdb |
| SEQ ID NO: 2696 | EEHEE_rd4_0982.pdb |
| SEQ ID NO: 2697 | EEHEE_rd4_0980.pdb |
| SEQ ID NO: 2698 | HHH_rd4_0791.pdb |
| SEQ ID NO: 2699 | HHH_rd1_0196.pdb |
| SEQ ID NO: 2700 | EHEE_rd4_0599.pdb |
| SEQ ID NO: 2701 | HHH_rd1_0080.pdb |
| SEQ ID NO: 2702 | EEHEE_rd3_0933.pdb |
| SEQ ID NO: 2703 | EEHEE_rd4_0635.pdb |
| SEQ ID NO: 2704 | EHEE_rd4_0970_pdb |
| SEQ ID NO: 2705 | EEHEE_rd3_1500.pdb |
| SEQ ID NO: 2706 | HHH_rd4_0944.pdb |
| SEQ ID NO: 2707 | EHEE_rd4_0548.pdb |
| SEQ ID NO: 2708 | EHEE_rd4_0350.pdb |
| SEQ ID NO: 2709 | EEHEE_rd3_1278.pdb |
| SEQ ID NO: 2710 | EHEE_rd4_0831.pdb |
| SEQ ID NO: 2711 | EEHEE_rd4_0360.pdb |
| SEQ ID NO: 2712 | HEEH_rd3_0525.pdb |
| SEQ ID NO: 2713 | EHEE_rd4_0115.pdb |
| SEQ ID NO: 2714 | EHEE_rd4_0182.pdb |
| SEQ ID NO: 2715 | EEHEE_rd4_0939.pdb |
| SEQ ID NO: 2716 | EHEE_rd4_0119.pdb |
| SEQ ID NO: 2717 | EEHEE_rd4_0282.pdb |
| SEQ ID NO: 2718 | HEEH_rd3_0117.pdb |
| SEQ ID NO: 2719 | EHEE_rd2_0222.pdb |
| SEQ ID NO: 2720 | EEHEE_rd4_0395.pdb |
| SEQ ID NO: 2721 | EEHEE_rd4_0421.pdb |
| SEQ ID NO: 2722 | EHEE_rd4_0454.pdb |
| SEQ ID NO: 2723 | EEHEE_rd4_0774.pdb |
| SEQ ID NO: 2724 | EEHEE_rd3_0711.pdb |
| SEQ ID NO: 2725 | HHH_rd1_0421.pdb |
| SEQ ID NO: 2726 | HHH_rd1_0295.pdb |
| SEQ ID NO: 2727 | EHEE_rd4_0753.pdb |
| SEQ ID NO: 2728 | HHH_rd2_0207.pdb |
| SEQ ID NO: 2729 | EEHEE_rd3_0009.pdb |
| SEQ ID NO: 2730 | EHEE_rd4_0311.pdb |
| SEQ ID NO: 2731 | HHH_rd1_0004.pdb |
| SEQ ID NO: 2732 | EHEE_rd2_1127.pdb |
| SEQ ID NO: 2733 | EEHEE_rd4_0265.pdb |
| SEQ ID NO: 2734 | EEHEE_rd3_0045.pdb |
| SEQ ID NO: 2735 | EHEE_rd4_0669.pdb |
| SEQ ID NO: 2736 | EEHEE_rd3_0129.pdb |
| SEQ ID NO: 2737 | HHH_rd3_0101.pdb |
| SEQ ID NO: 2738 | HEEH_rd3_1205.pdb |
| SEQ ID NO: 2739 | HHH_rd2_0062.pdb |
| SEQ ID NO: 2740 | EHEE_rd4_0934.pdb |
| SEQ ID NO: 2741 | HEEH_rd2_0525.pdb |
| SEQ ID NO: 2742 | EHEE_rd2_1108.pdb |
| SEQ ID NO: 2743 | EHEE_rd4_0851.pdb |
| SEQ ID NO: 2744 | EHEE_rd4_0300.pdb |
| SEQ ID NO: 2745 | EHEE_rd4_0818.pdb |
| SEQ ID NO: 2746 | EHEE_rd4_0588.pdb |
| SEQ ID NO: 2747 | EHEE_rd4_0538.pdb |
| SEQ ID NO: 2748 | HHH_rd4_1000.pdb |
| SEQ ID NO: 2749 | EHEE_rd4_0484.pdb |
| SEQ ID NO: 2750 | HEEH_rd4_0872.pdb |
| SEQ ID NO: 2751 | EHEE_rd4_0035.pdb |
| SEQ ID NO: 2752 | EEHEE_rd4_0515.pdb |
| SEQ ID NO: 2753 | EEHEE_rd3_0657.pdb |
| SEQ ID NO: 2754 | HHH_rd4_0681.pdb |
| SEQ ID NO: 2755 | EEHEE_rd3_1375.pdb |
| SEQ ID NO: 2756 | HHH_rd1_0829.pdb |
| SEQ ID NO: 2757 | EEHEE_rd3_1381.pdb |
| SEQ ID NO: 2758 | HHH_rd1_0043.pdb |
| SEQ ID NO: 2759 | HHH_rd4_0842.pdb |
| SEQ ID NO: 2760 | EEHEE_rd3_0830.pdb |
| SEQ ID NO: 2761 | EEHEE_rd3_0590.pdb |
| SEQ ID NO: 2762 | EEHEE_rd3_1418.pdb |
| SEQ ID NO: 2763 | EEHEE_rd4_0863.pdb |
| SEQ ID NO: 2764 | EEHEE_rd4_0589.pdb |
| SEQ ID NO: 2765 | EHEE_rd4_0046.pdb |
| SEQ ID NO: 2766 | HHH_rd4_0919.pdb |
| SEQ ID NO: 2767 | HHH_rd1_0637.pdb |
| SEQ ID NO: 2768 | EEHEE_rd4_0557.pdb |
| SEQ ID NO: 2769 | HHH_rd4_0350.pdb |
| SEQ ID NO: 2770 | EEHEE_rd3_1323.pdb |
| SEQ ID NO: 2771 | HHH_rd1_0207.pdb |
| SEQ ID NO: 2772 | EEHEE_rd4_0802.pdb |
| SEQ ID NO: 2773 | EEHEE_rd4_0512.pdb |
| SEQ ID NO: 2774 | EEHEE_rd4_0983.pdb |
| SEQ ID NO: 2775 | HHH_rd1_0403.pdb |
| SEQ ID NO: 2776 | HHH_rd1_0073.pdb |
| SEQ ID NO: 2777 | HHH_rd4_0509.pdb |
| SEQ ID NO: 2778 | HHH_rd1_0054.pdb |
| SEQ ID NO: 2779 | EEHEE_rd4_0615.pdb |
| SEQ ID NO: 2780 | EHEE_rd4_0670.pdb |
| SEQ ID NO: 2781 | EHEE_rd4_0323.pdb |
| SEQ ID NO: 2782 | EEHEE_rd4_0551.pdb |
| SEQ ID NO: 2783 | EEHEE_rd3_1191.pdb |
| SEQ ID NO: 2784 | HHH_rd4_0484.pdb |
| SEQ ID NO: 2785 | EHEE_rd4_0210.pdb |
| SEQ ID NO: 2786 | EEHEE_rd4_0483.pdb |
| SEQ ID NO: 2787 | HHH_rd4_0063.pdb |
| SEQ ID NO: 2788 | HHH_rd1_0217.pdb |
| SEQ ID NO: 2789 | EEHEE_rd4_0344.pdb |
| SEQ ID NO: 2790 | EHEE_rd4_0675.pdb |
| SEQ ID NO: 2791 | EHEE_rd4_0272.pdb |
| SEQ ID NO: 2792 | HHH_rd1_0329.pdb |
| SEQ ID NO: 2793 | HEEH_rd3_1152.pdb |
| SEQ ID NO: 2794 | EHEE_rd4_0872.pdb |
| SEQ ID NO: 2795 | EEHEE_rd4_0518.pdb |
| SEQ ID NO: 2796 | HHH_rd2_0122.pdb |
| SEQ ID NO: 2797 | HHH_rd3_0027.pdb |
| SEQ ID NO: 2798 | HHH_rd4_0900.pdb |
| SEQ ID NO: 2799 | HHH_rd1_0291.pdb |
| SEQ ID NO: 2800 | EHEE_rd3_0052.pdb |
| SEQ ID NO: 2801 | HHH_rd1_0464.pdb |
| SEQ ID NO: 2802 | EEHEE_rd4_0516.pdb |
| SEQ ID NO: 2803 | HHH_rd2_0024.pdb |
| SEQ ID NO: 2804 | EEHEE_rd3_0776.pdb |
| SEQ ID NO: 2805 | HHH_rd3_0057.pdb |
| SEQ ID NO: 2806 | EHEE_rd2_0706.pdb |
| SEQ ID NO: 2807 | HHH_rd4_0520.pdb |
| SEQ ID NO: 2808 | EEHEE_rd3_0612.pdb |
| SEQ ID NO: 2809 | HEEH_rd3_0473.pdb |
| SEQ ID NO: 2810 | HHH_rd4_0229.pdb |
| SEQ ID NO: 2811 | HHH_rd3_0145.pdb |
| SEQ ID NO: 2812 | EHEE_rd2_0907.pdb |
| SEQ ID NO: 2813 | HEEH_rd3_1304.pdb |
| SEQ ID NO: 2814 | EEHEE_rd4_0864.pdb |
| SEQ ID NO: 2815 | EEHEE_rd3_0258.pdb |
| SEQ ID NO: 2816 | EEHEE_rd3_0870.pdb |
| SEQ ID NO: 2817 | HHH_rd4_0144.pdb |
| SEQ ID NO: 2818 | HHH_rd4_0515.pdb |
| SEQ ID NO: 2819 | EEHEE_rd3_0950.pdb |
| SEQ ID NO: 2820 | EHEE_rd4_0554.pdb |
| SEQ ID NO: 2821 | EEHEE_rd3_0164.pdb |
| SEQ ID NO: 2822 | HHH_rd1_0020.pdb |
| SEQ ID NO: 2823 | EHEE_rd4_0402.pdb |
| SEQ ID NO: 2824 | EEHEE_rd3_0430.pdb |
| SEQ ID NO: 2825 | EEHEE_rd4_0393.pdb |
| SEQ ID NO: 2826 | HHH_rd4_0997.pdb |
| SEQ ID NO: 2827 | EHEE_rd3_0050.pdb |
| SEQ ID NO: 2828 | EHEE_rd4_0388.pdb |
| SEQ ID NO: 2829 | HHH_rd4_0784.pdb |
| SEQ ID NO: 2830 | EEHEE_rd4_0361.pdb |
| SEQ ID NO: 2831 | EEHEE_rd3_1631.pdb |
| SEQ ID NO: 2832 | EHEE_rd4_0375.pdb |
| SEQ ID NO: 2833 | HEEH_rd2_0383.pdb |
| SEQ ID NO: 2834 | HHH_rd1_0101.pdb |
| SEQ ID NO: 2835 | EHEE_rd4_0110.pdb |
| SEQ ID NO: 2836 | HEEH_rd3_1530.pdb |
| SEQ ID NO: 2837 | EHEE_rd4_0293.pdb |
| SEQ ID NO: 2838 | EHEE_rd4_0706.pdb |
| SEQ ID NO: 2839 | EEHEE_rd3_0746.pdb |
| SEQ ID NO: 2840 | HHH_rd1_0117.pdb |
| SEQ ID NO: 2841 | HHH_rd4_0650.pdb |
| SEQ ID NO: 2842 | EEHEE_rd3_0348.pdb |
| SEQ ID NO: 2843 | HHH_rd3_0167.pdb |
| SEQ ID NO: 2844 | HHH_rd4_0843.pdb |
| SEQ ID NO: 2845 | EHEE_rd4_0954.pdb |
| SEQ ID NO: 2846 | EEHEE_rd3_1279.pdb |
| SEQ ID NO: 2847 | HHH_rd1_0522.pdb |
| SEQ ID NO: 2848 | HHH_rd1_0243.pdb |
| SEQ ID NO: 2849 | HHH_rd4_0627.pdb |
| SEQ ID NO: 2850 | HHH_rd4_0261.pdb |
| SEQ ID NO: 2851 | HHH_rd4_0290.pdb |
| SEQ ID NO: 2852 | EEHEE_rd4_0593.pdb |
| SEQ ID NO: 2853 | EEHEE_rd4_0244.pdb |
| SEQ ID NO: 2854 | HEEH_rd2_0360.pdb |
| SEQ ID NO: 2855 | HEEH_rd3_0804.pdb |
| SEQ ID NO: 2856 | EHEE_rd4_0122.pdb |
| SEQ ID NO: 2857 | EEHEE_rd3_1008.pdb |
| SEQ ID NO: 2858 | HHH_rd1_0551.pdb |
| SEQ ID NO: 2859 | HHH_rd3_0046.pdb |
| SEQ ID NO: 2860 | EHEE_rd4_0225.pdb |
| SEQ ID NO: 2861 | EEHEE_rd2_0391.pdb |
| SEQ ID NO: 2862 | HHH_rd1_0225.pdb |
| SEQ ID NO: 2863 | HHH_rd4_0318.pdb |
| SEQ ID NO: 2864 | HHH_rd4_0856.pdb |
| SEQ ID NO: 2865 | EEHEE_rd3_1009.pdb |
| SEQ ID NO: 2866 | HEEH_rd2_0519.pdb |
| SEQ ID NO: 2867 | HHH_rd1_0587.pdb |
| SEQ ID NO: 2868 | EEHEE_rd4_0878.pdb |
| SEQ ID NO: 2869 | EEHEE_rd4_0509.pdb |
| SEQ ID NO: 2870 | EHEE_rd4_0238.pdb |
| SEQ ID NO: 2871 | EHEE_rd2_0794.pdb |
| SEQ ID NO: 2872 | HHH_rd1_0759.pdb |
| SEQ ID NO: 2873 | EHEE_rd4_0914.pdb |
| SEQ ID NO: 2874 | EEHEE_rd4_0892.pdb |
| SEQ ID NO: 2875 | EHEE_rd2_0303.pdb |
| SEQ ID NO: 2876 | EEHEE_rd4_0811.pdb |
| SEQ ID NO: 2877 | EEHEE_rd3_0760.pdb |
| SEQ ID NO: 2878 | EHEE_rd4_0055.pdb |
| SEQ ID NO: 2879 | HEEH_rd3_1547.pdb |
| SEQ ID NO: 2880 | EHEE_rd4_0602.pdb |
| SEQ ID NO: 2881 | HHH_rd1_0535.pdb |
| SEQ ID NO: 2882 | EEHEE_rd3_0181.pdb |
| SEQ ID NO: 2883 | EHEE_rd4_0994.pdb |
| SEQ ID NO: 2884 | EHEE_rd4_0268.pdb |
| SEQ ID NO: 2885 | HHH_rd3_0156.pdb |
| SEQ ID NO: 2886 | EHEE_rd4_0222.pdb |
| SEQ ID NO: 2887 | EHEE_rd4_0787.pdb |
| SEQ ID NO: 2888 | HHH_rd1_0024.pdb |
| SEQ ID NO: 2889 | EEHEE_rd3_0226.pdb |
| SEQ ID NO: 2890 | EHEE_rd2_0941.pdb |
| SEQ ID NO: 2891 | EEHEE_rd4_0545.pdb |
| SEQ ID NO: 2892 | EHEE_rd4_0847.pdb |
| SEQ ID NO: 2893 | EEHEE_rd4_0539.pdb |
| SEQ ID NO: 2894 | EHEE_rd4_0932.pdb |
| SEQ ID NO: 2895 | EEHEE_rd3_0453.pdb |
| SEQ ID NO: 2896 | HEEH_rd2_0539.pdb |
| SEQ ID NO: 2897 | EEHEE_rd4_0761.pdb |
| SEQ ID NO: 2898 | EHEE_rd3_0197.pdb |
| SEQ ID NO: 2899 | HHH_rd4_0876.pdb |
| SEQ ID NO: 2900 | EEHEE_rd4_0412.pdb |
| SEQ ID NO: 2901 | HHH_rd1_0245.pdb |
| SEQ ID NO: 2902 | HHH_rd1_0324.pdb |
| SEQ ID NO: 2903 | EEHEE_rd4_0211.pdb |
| SEQ ID NO: 2904 | EEHEE_rd4_0148.pdb |
| SEQ ID NO: 2905 | HHH_rd4_0886.pdb |
| SEQ ID NO: 2906 | HHH_rd1_0520.pdb |
| SEQ ID NO: 2907 | HEEH_rd3_0009.pdb |
| SEQ ID NO: 2908 | HHH_rd1_0524.pdb |
| SEQ ID NO: 2909 | EEHEE_rd4_0697.pdb |
| SEQ ID NO: 2910 | EHEE_rd4_0214.pdb |
| SEQ ID NO: 2911 | HHH_rd1_0269.pdb |
| SEQ ID NO: 2912 | EHEE_rd4_0694.pdb |
| SEQ ID NO: 2913 | EEHEE_rd3_1189.pdb |
| SEQ ID NO: 2914 | EEHEE_rd4_0662.pdb |
| SEQ ID NO: 2915 | EHEE_rd2_0097.pdb |
| SEQ ID NO: 2916 | EHEE_rd3_0172.pdb |
| SEQ ID NO: 2917 | EHEE_rd2_0412.pdb |
| SEQ ID NO: 2918 | EEHEE_rd3_0668.pdb |
| SEQ ID NO: 2919 | HEEH_rd4_0565.pdb |
| SEQ ID NO: 2920 | EEHEE_rd4_0669.pdb |
| SEQ ID NO: 2921 | EHEE_rd4_0459.pdb |
| SEQ ID NO: 2922 | HEEH_rd2_0471.pdb |
| SEQ ID NO: 2923 | HHH_rd4_0530.pdb |
| SEQ ID NO: 2924 | EHEE_rd1_0536.pdb |
| SEQ ID NO: 2925 | EEHEE_rd4_0220.pdb |
| SEQ ID NO: 2926 | EEHEE_rd4_0642.pdb |
| SEQ ID NO: 2927 | EEHEE_rd4_0433.pdb |
| SEQ ID NO: 2928 | HHH_rd1_0803.pdb |
| SEQ ID NO: 2929 | HHH_rd3_0009.pdb |
| SEQ ID NO: 2930 | EHEE_rd4_0016.pdb |
| SEQ ID NO: 2931 | EEHEE_rd4_0090.pdb |
| SEQ ID NO: 2932 | EHEE_rd4_0751.pdb |
| SEQ ID NO: 2933 | HHH_rd1_0141.pdb |
| SEQ ID NO: 2934 | HHH_rd4_0839.pdb |
| SEQ ID NO: 2935 | EHEE_rd2_0600.pdb |
| SEQ ID NO: 2936 | HHH_rd2_0140.pdb |
| SEQ ID NO: 2937 | EHEE_rd4_0312.pdb |
| SEQ ID NO: 2938 | HHH_rd4_0652.pdb |
| SEQ ID NO: 2939 | EHEE_rd4_0759.pdb |
| SEQ ID NO: 2940 | EEHEE_rd3_0403.pdb |
| SEQ ID NO: 2941 | EEHEE_rd3_0355.pdb |
| SEQ ID NO: 2942 | HHH_rd4_0829.pdb |
| SEQ ID NO: 2943 | EEHEE_rd4_0773.pdb |
| SEQ ID NO: 2944 | HHH_rd1_0832.pdb |
| SEQ ID NO: 2945 | EHEE_rd3_0147.pdb |
| SEQ ID NO: 2946 | HHH_rd1_0013.pdb |
| SEQ ID NO: 2947 | HHH_rd4_0703.pdb |
| SEQ ID NO: 2948 | HHH_rd4_0677.pdb |
| SEQ ID NO: 2949 | EEHEE_rd3_1717.pdb |
| SEQ ID NO: 2950 | EEHEE_rd3_0273.pdb |
| SEQ ID NO: 2951 | EHEE_rd4_0390.pdb |
| SEQ ID NO: 2952 | EEHEE_rd4_0505.pdb |
| SEQ ID NO: 2953 | EHEE_rd4_0886.pdb |
| SEQ ID NO: 2954 | EEHEE_rd4_0406.pdb |
| SEQ ID NO: 2955 | HHH_rd4_0184.pdb |
| SEQ ID NO: 2956 | EHEE_rd3_0047.pdb |
| SEQ ID NO: 2957 | EEHEE_rd3_0101.pdb |
| SEQ ID NO: 2958 | HHH_rd2_0068.pdb |
| SEQ ID NO: 2959 | EHEE_rd4_0916.pdb |
| SEQ ID NO: 2960 | HEEH_rd3_0083.pdb |
| SEQ ID NO: 2961 | HHH_rd1_0039.pdb |
| SEQ ID NO: 2962 | HEEH_rd3_0049.pdb |
| SEQ ID NO: 2963 | EHEE_rd4_0061.pdb |
| SEQ ID NO: 2964 | HHH_rd4_0912.pdb |
| SEQ ID NO: 2965 | EHEE_rd4_0902.pdb |
| SEQ ID NO: 2966 | EEHEE_rd4_0372.pdb |
| SEQ ID NO: 2967 | EEHEE_rd2_0554.pdb |
| SEQ ID NO: 2968 | EHEE_rd4_0107.pdb |
| SEQ ID NO: 2969 | EEHEE_rd4_0503.pdb |
| SEQ ID NO: 2970 | EEHEE_rd3_1515.pdb |
| SEQ ID NO: 2971 | EHEE_rd4_0724.pdb |
| SEQ ID NO: 2972 | HHH_rd4_0140.pdb |
| SEQ ID NO: 2973 | EHEE_rd2_0696.pdb |
| SEQ ID NO: 2974 | EHEE_rd4_0803.pdb |
| SEQ ID NO: 2975 | EEHEE_rd3_0107.pdb |
| SEQ ID NO: 2976 | HEEH_rd3_0416.pdb |
| SEQ ID NO: 2977 | EHEE_rd4_0555.pdb |
| SEQ ID NO: 2978 | EEHEE_rd4_0906.pdb |
| SEQ ID NO: 2979 | EEHEE_rd4_0450.pdb |
| SEQ ID NO: 2980 | EEHEE_rd4_0438.pdb |
| SEQ ID NO: 2981 | EEHEE_rd4_0453.pdb |
| SEQ ID NO: 2982 | HEEH_rd4_0601.pdb |
| SEQ ID NO: 2983 | EEHEE_rd3_0402.pdb |
| SEQ ID NO: 2984 | EEHEE_rd4_0170.pdb |
| SEQ ID NO: 2985 | EEHEE_rd4_0727.pdb |
| SEQ ID NO: 2986 | EEHEE_rd4_0095.pdb |
| SEQ ID NO: 2987 | EHEE_rd4_0769.pdb |
| SEQ ID NO: 2988 | EEHEE_rd3_1213.pdb |
| SEQ ID NO: 2989 | EEHEE_rd3_1813.pdb |
| SEQ ID NO: 2990 | HHH_rd3_0070.pdb |
| SEQ ID NO: 2991 | HHH_rd4_0620.pdb |
| SEQ ID NO: 2992 | EEHEE_rd3_0339.pdb |
| SEQ ID NO: 2993 | EHEE_rd4_0180.pdb |
| SEQ ID NO: 2994 | HHH_rd4_0510.pdb |
| SEQ ID NO: 2995 | EEHEE_rd4_0396.pdb |
| SEQ ID NO: 2996 | EEHEE_rd3_0873.pdb |
| SEQ ID NO: 2997 | HHH_rd4_0030.pdb |
| SEQ ID NO: 2998 | EHEE_rd3_0181.pdb |
| SEQ ID NO: 2999 | HHH_rd4_0697.pdb |
| SEQ ID NO: 3000 | HHH_rd4_0922.pdb |
| SEQ ID NO: 3001 | EHEE_rd4_0038.pdb |
| SEQ ID NO: 3002 | HHH_rd1_0577.pdb |
| SEQ ID NO: 3003 | EHEE_rd4_0193.pdb |
| SEQ ID NO: 3004 | HHH_rd4_0513.pdb |
| SEQ ID NO: 3005 | HEEH_rd3_0373.pdb |
| SEQ ID NO: 3006 | EEHEE_rd4_0944.pdb |
| SEQ ID NO: 3007 | EEHEE_rd4_0228.pdb |
| SEQ ID NO: 3008 | HHH_rd3_0141.pdb |
| SEQ ID NO: 3009 | EEHEE_rd3_1345.pdb |
| SEQ ID NO: 3010 | EEHEE_rd4_0984.pdb |
| SEQ ID NO: 3011 | EEHEE_rd4_0404.pdb |
| SEQ ID NO: 3012 | EHEE_rd2_0198.pdb |
| SEQ ID NO: 3013 | EEHEE_rd4_0920.pdb |
| SEQ ID NO: 3014 | EHEE_rd2_0311.pdb |
| SEQ ID NO: 3015 | EEHEE_rd3_0077.pdb |
| SEQ ID NO: 3016 | HHH_rd1_0306.pdb |
| SEQ ID NO: 3017 | EHEE_rd1_0491.pdb |
| SEQ ID NO: 3018 | EEHEE_rd3_0241.pdb |
| SEQ ID NO: 3019 | HHH_rd1_0075.pdb |
| SEQ ID NO: 3020 | EEHEE_rd3_0008.pdb |
| SEQ ID NO: 3021 | EHEE_rd4_0373.pdb |
| SEQ ID NO: 3022 | HHH_rd4_0419.pdb |
| SEQ ID NO: 3023 | EHEE_rd4_0755.pdb |
| SEQ ID NO: 3024 | EHEE_rd4_0327.pdb |
| SEQ ID NO: 3025 | EEHEE_rd4_0247.pdb |
| SEQ ID NO: 3026 | EHEE_rd4_0779.pdb |
| SEQ ID NO: 3027 | EEHEE_rd3_1307.pdb |
| SEQ ID NO: 3028 | EEHEE_rd4_0286.pdb |
| SEQ ID NO: 3029 | HHH_rd1_0183.pdb |
| SEQ ID NO: 3030 | EHEE_rd4_0899.pdb |
| SEQ ID NO: 3031 | EEHEE_rd2_0913.pdb |
| SEQ ID NO: 3032 | HHH_rd2_0144.pdb |
| SEQ ID NO: 3033 | HHH_rd2_0174.pdb |
| SEQ ID NO: 3034 | EEHEE_rd4_0783.pdb |
| SEQ ID NO: 3035 | HHH_rd3_0099.pdb |
| SEQ ID NO: 3036 | EHEE_rd4_0798.pdb |
| SEQ ID NO: 3037 | EEHEE_rd3_0283.pdb |
| SEQ ID NO: 3038 | EHEE_rd3_0247.pdb |
| SEQ ID NO: 3039 | EHEE_rd4_0578.pdb |
| SEQ ID NO: 3040 | EEHEE_rd4_0964.pdb |
| SEQ ID NO: 3041 | EHEE_rd4_0907.pdb |
| SEQ ID NO: 3042 | HHH_rd4_0902.pdb |
| SEQ ID NO: 3043 | HHH_rd1_1818.pdb |
| SEQ ID NO: 3044 | EEHEE_rd4_0033.pdb |
| SEQ ID NO: 3045 | EEHEE_rd3_0740.pdb |
| SEQ ID NO: 3046 | HEEH_rd2_0086.pdb |
| SEQ ID NO: 3047 | EHEE_rd4_0078.pdb |
| SEQ ID NO: 3048 | HHH_rd3_0214.pdb |
| SEQ ID NO: 3049 | EEHEE_rd3_1092.pdb |
| SEQ ID NO: 3050 | EEHEE_rd3_0725.pdb |
| SEQ ID NO: 3051 | EEHEE_rd4_0689.pdb |
| SEQ ID NO: 3052 | EEHEE_rd4_0444.pdb |
| SEQ ID NO: 3053 | EHEE_rd4_0537.pdb |
| SEQ ID NO: 3054 | EHEE_rd4_0175.pdb |
| SEQ ID NO: 3055 | EEHEE_rd4_0128.pdb |
| SEQ ID NO: 3056 | EEHEE_rd3_1467.pdb |
| SEQ ID NO: 3057 | HEEH_rd4_0279.pdb |
| SEQ ID NO: 3058 | EEHEE_rd3_1361.pdb |
| SEQ ID NO: 3059 | HHH_rd4_0814.pdb |
| SEQ ID NO: 3060 | HEEH_rd4_0009.pdb |
| SEQ ID NO: 3061 | EHEE_rd2_0558.pdb |
| SEQ ID NO: 3062 | EHEE_rd4_0498.pdb |
| SEQ ID NO: 3063 | HEEH_rd4_0226.pdb |
| SEQ ID NO: 3064 | HHH_rd4_0906.pdb |
| SEQ ID NO: 3065 | HHH_rd4_0864.pdb |
| SEQ ID NO: 3066 | EEHEE_rd4_0677.pdb |
| SEQ ID NO: 3067 | HEEH_rd4_0323.pdb |
| SEQ ID NO: 3068 | HEEH_rd3_0436.pdb |
| SEQ ID NO: 3069 | HEEH_rd3_1294.pdb |
| SEQ ID NO: 3070 | EHEE_rd4_0620.pdb |
| SEQ ID NO: 3071 | EKEE_rd4_0404.pdb |
| SEQ ID NO: 3072 | EEHEE_rd3_0289.pdb |
| SEQ ID NO: 3073 | EHEE_rd4_0577.pdb |
| SEQ ID NO: 3074 | EEHEE_rd4_0703.pdb |
| SEQ ID NO: 3075 | EHEE_rd4_0452.pdb |
| SEQ ID NO: 3076 | HHH_rd4_0731.pdb |
| SEQ ID NO: 3077 | EEHEE_rd3_0775.pdb |
| SEQ ID NO: 3078 | HEEH_rd3_0747.pdb |
| SEQ ID NO: 3079 | EEHEE_rd4_0922.pdb |
| SEQ ID NO: 3080 | EEHEE_rd3_1701.pdb |
| SEQ ID NO: 3081 | HHH_rd1_0557.pdb |
| SEQ ID NO: 3082 | EEHEE_rd4_0120.pdb |
| SEQ ID NO: 3083 | HHH_rd3_0054.pdb |
| SEQ ID NO: 3084 | HEEH_rd3_0192.pdb |
| SEQ ID NO: 3085 | HHH_rd4_0594.pdb |
| SEQ ID NO: 3086 | EEHEE_rd3_1774.pdb |
| SEQ ID NO: 3087 | EEHEE_rd4_0435.pdb |
| SEQ ID NO: 3088 | HHH_rd2_0011.pdb |
| SEQ ID NO: 3089 | EHEE_rd4_0305.pdb |
| SEQ ID NO: 3090 | EEHEE_rd3_1099.pdb |
| SEQ ID NO: 3091 | EHEE_rd2_0808.pdb |
| SEQ ID NO: 3092 | EEHEE_rd3_1154.pdb |
| SEQ ID NO: 3093 | HHH_rd1_0516.pdb |
| SEQ ID NO: 3094 | EEHEE_rd4_0004.pdb |
| SEQ ID NO: 3095 | HEEH_rd3_0399.pdb |
| SEQ ID NO: 3096 | HHH_rd1_0749.pdb |
| SEQ ID NO: 3097 | EHEE_rd4_0013.pdb |
| SEQ ID NO: 3098 | EEHEE_rd3_1273.pdb |
| SEQ ID NO: 3099 | HEEH_rd3_0616.pdb |
| SEQ ID NO: 3100 | EHEE_rd4_0051.pdb |
| SEQ ID NO: 3101 | EHEE_rd4_0762.pdb |
| SEQ ID NO: 3102 | HHH_rd4_0773.pdb |
| SEQ ID NO: 3103 | EEHEE_rd3_1519.pdb |
| SEQ ID NO: 3104 | EHEE_rd4_0675.pdb |
| SEQ ID NO: 3105 | HHH_rd1_0511.pdb |
| SEQ ID NO: 3106 | HEEH_rd3_1217.pdb |
| SEQ ID NO: 3107 | HEEH_rd2_0032.pdb |
| SEQ ID NO: 3108 | HHH_rd4_0421.pdb |
| SEQ ID NO: 3109 | EHEE_rd2_1165.pdb |
| SEQ ID NO: 3110 | EHEE_rd4_0785.pdb |
| SEQ ID NO: 3111 | EEHEE_rd4_0715.pdb |
| SEQ ID NO: 3112 | EEHEE_rd4_0264.pdb |
| SEQ ID NO: 3113 | EHEE_rd4_0710.pdb |
| SEQ ID NO: 3114 | HHH_rd1_0277.pdb |
| SEQ ID NO: 3115 | HEEH_rd3_0301.pdb |
| SEQ ID NO: 3116 | EEHEE_rd3_0227.pdb |
| SEQ ID NO: 3117 | EHEE_rd4_0092.pdb |
| SEQ ID NO: 3118 | EEHEE_rd4_0790.pdb |
| SEQ ID NO: 3119 | EHEE_rd4_0940.pdb |
| SEQ ID NO: 3120 | EHEE_rd4_0387.pdb |
| SEQ ID NO: 3121 | EEHEE_rd3_1106.pdb |
| SEQ ID NO: 3122 | HHH_rd4_0622.pdb |
| SEQ ID NO: 3123 | EEHEE_rd4_0947.pdb |
| SEQ ID NO: 3124 | HEEH_rd3_0502.pdb |
| SEQ ID NO: 3125 | EHEE_rd4_0623.pdb |
| SEQ ID NO: 3126 | EEHEE_rd4_0528.pdb |
| SEQ ID NO: 3127 | EHEE_rd4_0455.pdb |
| SEQ ID NO: 3128 | EEHEE_rd3_0811.pdb |
| SEQ ID NO: 3129 | EHEE_rd4_0011.pdb |
| SEQ ID NO: 3130 | HHH_rd1_0555.pdb |
| SEQ ID NO: 3131 | EEHEE_rd3_1091.pdb |
| SEQ ID NO: 3132 | EEHEE_rd3_1255.pdb |
| SEQ ID NO: 3133 | EEHEE_rd4_0728.pdb |
| SEQ ID NO: 3134 | EEHEE_rd4_0966.pdb |
| SEQ ID NO: 3135 | HEEH_rd3_0567.pdb |
| SEQ ID NO: 3136 | EHEE_rd3_0001.pdb |
| SEQ ID NO: 3137 | EEHEE_rd3_0645.pdb |
| SEQ ID NO: 3138 | EEHEE_rd4_0113.pdb |
| SEQ ID NO: 3139 | HHH_rd4_0136.pdb |
| SEQ ID NO: 3140 | EHEE_rd4_0566.pdb |
| SEQ ID NO: 3141 | EHEE_rd2_0559.pdb |
| SEQ ID NO: 3142 | EEHEE_rd4_0816.pdb |
| SEQ ID NO: 3143 | EHEE_rd4_0687.pdb |
| SEQ ID NO: 3144 | EHEE_rd2_0797.pdb |
| SEQ ID NO: 3145 | EEHEE_rd3_1171.pdb |
| SEQ ID NO: 3146 | EHEE_rd4_0063.pdb |
| SEQ ID NO: 3147 | EHEE_rd2_0425.pdb |
| SEQ ID NO: 3148 | EHEE_rd4_0289.pdb |
| SEQ ID NO: 3149 | EHEE_rd4_0845.pdb |
| SEQ ID NO: 3150 | HEEH_rd2_0599.pdb |
| SEQ ID NO: 3151 | HHH_rd4_0408.pdb |
| SEQ ID NO: 3152 | EHEE_rd4_0141.pdb |
| SEQ ID NO: 3153 | EHEE_rd4_0799.pdb |
| SEQ ID NO: 3154 | EHH_rd4_0439.pdb |
| SEQ ID NO: 3155 | EEHEE_rd4_0667.pdb |
| SEQ ID NO: 3156 | EHEE_rd2_0152.pdb |
| SEQ ID NO: 3157 | EEHEE_rd4_0567.pdb |
| SEQ ID NO: 3158 | HHH_rd1_0669.pdb |
| SEQ ID NO: 3159 | HHH_rd4_0137.pdb |
| SEQ ID NO: 3160 | HHH_rd1_0702.pdb |
| SEQ ID NO: 3161 | HEEH_rd1_0741.pdb |
| SEQ ID NO: 3162 | HHH_rd4_0062.pdb |
| SEQ ID NO: 3163 | EHEE_rd1_0945.pdb |
| SEQ ID NO: 3164 | EHEE_rd4_0362.pdb |
| SEQ ID NO: 3165 | EHEE_rd2_0402.pdb |
| SEQ ID NO: 3166 | EEHEE_rd3_1272.pdb |
| SEQ ID NO: 3167 | EEHEE_rd4_0734.pdb |
| SEQ ID NO: 3168 | EEHEE_rd3_0587.pdb |
| SEQ ID NO: 3169 | EEHEE_rd3_0683.pdb |
| SEQ ID NO: 3170 | EHEE_rd2_0236.pdb |
| SEQ ID NO: 3171 | HHH_rd1_0046.pdb |
| SEQ ID NO: 3172 | HHH_rd1_0053.pdb |
| SEQ ID NO: 3173 | HHH_rd4_0905.pdb |
| SEQ ID NO: 3174 | HHH_rd4_0194.pdb |
| SEQ ID NO: 3175 | EEHEE_rd4_0974.pdb |
| SEQ ID NO: 3176 | HEEH_rd2_0465.pdb |
| SEQ ID NO: 3177 | EEHEE_rd3_1275.pdb |
| SEQ ID NO: 3178 | EEHEE_rd4_0488.pdb |
| SEQ ID NO: 3179 | HHH_rd4_0844.pdb |
| SEQ ID NO: 3180 | HHH_rd3_0115.pdb |
| SEQ ID NO: 3181 | EEHEE_rd3_0011.pdb |
| SEQ ID NO: 3182 | HHH_rd4_0280.pdb |
| SEQ ID NO: 3183 | EEHEE_rd3_1069.pdb |
| SEQ ID NO: 3184 | EHEE_rd4_0124.pdb |
| SEQ ID NO: 3185 | EHEE_rd3_0200.pdb |
| SEQ ID NO: 3186 | HHH_rd4_0223.pdb |
| SEQ ID NO: 3187 | EHEE_rd3_0114.pdb |
| SEQ ID NO: 3188 | EEHEE_rd4_0437.pdb |
| SEQ ID NO: 3189 | EEHEE_rd4_0671.pdb |
| SEQ ID NO: 3190 | HEEH_rd4_0566.pdb |
| SEQ ID NO: 3191 | EHEE_rd4_0929.pdb |
| SEQ ID NO: 3192 | EEHEE_rd3_1076.pdb |
| SEQ ID NO: 3193 | EEHEE_rd4_0103.pdb |
| SEQ ID NO: 3194 | HHH_rd1_0440.pdb |
| SEQ ID NO: 3195 | EEHEE_rd3_1322.pdb |
| SEQ ID NO: 3196 | EHEE_rd4_0355.pdb |
| SEQ ID NO: 3197 | HHH_rd1_0996.pdb |
| SEQ ID NO: 3198 | EEHEE_rd3_1401.pdb |
| SEQ ID NO: 3199 | EEHEE_rd4_0351.pdb |
| SEQ ID NO: 3200 | EEHEE_rd3_1622.pdb |
| SEQ ID NO: 3201 | EHEE_rd2_0075.pdb |
| SEQ ID NO: 3202 | EEHEE_rd3_1647.pdb |
| SEQ ID NO: 3203 | HHH_rd4_0596.pdb |
| SEQ ID NO: 3204 | EEHEE_rd3_0748.pdb |
| SEQ ID NO: 3205 | HHH_rd4_0330.pdb |
| SEQ ID NO: 3206 | EEHEE_rd4_0346.pdb |
| SEQ ID NO: 3207 | HHH_rd3_0192.pdb |
| SEQ ID NO: 3208 | HHH_rd1_0304.pdb |
| SEQ ID NO: 3209 | HHH_rd3_0102.pdb |
| SEQ ID NO: 3210 | EHEE_rd3_0122.pdb |
| SEQ ID NO: 3211 | EHEE_rd4_0421.pdb |
| SEQ ID NO: 3212 | HHH_rd1_0911.pdb |
| SEQ ID NO: 3213 | EEHEE_rd4_0139.pdb |
| SEQ ID NO: 3214 | HEEH_rd3_0139.pdb |
| SEQ ID NO: 3215 | EEHEE_rd3_0010.pdb |
| SEQ ID NO: 3216 | HHH_rd4_0503.pdb |
| SEQ ID NO: 3217 | EEHEE_rd3_1587.pdb |
| SEQ ID NO: 3218 | EEHEE_rd4_0527.pdb |
| SEQ ID NO: 3219 | EEHEE_rd4_0914.pdb |
| SEQ ID NO: 3220 | EHEE_rd4_0313.pdb |
| SEQ ID NO: 3221 | EEHEE_rd3_0942.pdb |
| SEQ ID NO: 3222 | HEEH_rd4_0097.pdb |
| SEQ ID NO: 3223 | EEHEE_rd4_0534.pdb |
| SEQ ID NO: 3224 | EHEE_rd2_1019.pdb |
| SEQ ID NO: 3225 | EEHEE_rd4_0854.pdb |
| SEQ ID NO: 3226 | HHH_rd1_0711.pdb |
| SEQ ID NO: 3227 | HHH_rd4_0788.pdb |
| SEQ ID NO: 3228 | EEHEE_rd3_0315.pdb |
| SEQ ID NO: 3229 | EEHEE_rd3_0932.pdb |
| SEQ ID NO: 3230 | EEHEE_rd4_0496.pdb |
| SEQ ID NO: 3231 | EHEE_rd2_0229.pdb |
| SEQ ID NO: 3232 | EHEE_rd4_0229.pdb |
| SEQ ID NO: 3233 | EHEE_rd4_0286.pdb |
| SEQ ID NO: 3234 | HHH_rd4_0807.pdb |
| SEQ ID NO: 3235 | EEHEE_rd4_0808.pdb |
| SEQ ID NO: 3236 | EEHEE_rd3_0298.pdb |
| SEQ ID NO: 3237 | EEHEE_rd3_0243.pdb |
| SEQ ID NO: 3238 | EHEE_rd4_0052.pdb |
| SEQ ID NO: 3239 | EEHEE_rd4_0269.pdb |
| SEQ ID NO: 3240 | EEHEE_rd4_0441.pdb |
| SEQ ID NO: 3241 | EEHEE_rd4_0300.pdb |
| SEQ ID NO: 3242 | HHH_rd4_0546.pdb |
| SEQ ID NO: 3243 | EEHEE_rd4_0770.pdb |
| SEQ ID NO: 3244 | HHH_rd3_0171.pdb |
| SEQ ID NO: 3245 | HHH_rd4_0307.pdb |
| SEQ ID NO: 3246 | EEHEE_rd3_0706.pdb |
| SEQ ID NO: 3247 | EEHEE_rd3_1000.pdb |
| SEQ ID NO: 3248 | EHEE_rd4_05153.pdb |
| SEQ ID NO: 3249 | EHEE_rd4_0767.pdb |
| SEQ ID NO: 3250 | EHEE_rd4_0209.pdb |
| SEQ ID NO: 3251 | EEHEE_rd4_0342.pdb |
| SEQ ID NO: 3252 | EEHEE_rd3_1208.pdb |
| SEQ ID NO: 3253 | EEHEE_rd4_0235.pdb |
| SEQ ID NO: 3254 | EEHEE_rd4_0745.pdb |
| SEQ ID NO: 3255 | HHH_rd4_0369.pdb |
| SEQ ID NO: 3256 | HHH_rd4_0959.pdb |
| SEQ ID NO: 3257 | HHH_rd4_0182.pdb |
| SEQ ID NO: 3258 | EEHEE_rd3_0945.pdb |
| SEQ ID NO: 3259 | HHH_rd1_0715.pdb |
| SEQ ID NO: 3260 | EEHEE_rd3_0948.pdb |
| SEQ ID NO: 3261 | HHH_rd1_0052.pdb |
| SEQ ID NO: 3262 | EHEE_rd4_0245.pdb |
| SEQ ID NO: 3263 | HEEH_rd3_0111.pdb |
| SEQ ID NO: 3264 | HHH_rd1_0473.pdb |
| SEQ ID NO: 3265 | HHH_rd3_0196.pdb |
| SEQ ID NO: 3266 | HEEH_rd3_1413.pdb |
| SEQ ID NO: 3267 | EEHEE_rd4_0699.pdb |
| SEQ ID NO: 3268 | HHH_rd4_0096.pdb |
| SEQ ID NO: 3269 | EEHEE_rd4_0730.pdb |
| SEQ ID NO: 3270 | HEEH_rd3_0088.pdb |
| SEQ ID NO: 3271 | EHEE_rd4_0417.pdb |
| SEQ ID NO: 3272 | EEHEE_rd4_0291.pdb |
| SEQ ID NO: 3273 | EEHEE_rd4_0681.pdb |
| SEQ ID NO: 3274 | EEHEE_rd3_1117.pdb |
| SEQ ID NO: 3275 | EEHEE_rd4_0370.pdb |
| SEQ ID NO: 3276 | EEHEE_rd4_0408.pdb |
| SEQ ID NO: 3277 | EEHEE_rd3_0499.pdb |
| SEQ ID NO: 3278 | EEHEE_rd4_0832.pdb |
| SEQ ID NO: 3279 | EHEE_rd4_0156.pdb |
| SEQ ID NO: 3280 | HEEH_rd2_0646.pdb |
| SEQ ID NO: 3281 | EHEE_rd4_0885.pdb |
| SEQ ID NO: 3282 | EEHEE_rd4_0733.pdb |
| SEQ ID NO: 3283 | EEHEE_rd1_0699.pdb |
| SEQ ID NO: 3284 | EEHEE_rd3_1365.pdb |
| SEQ ID NO: 3285 | EHEE_rd4_0105.pdb |
| SEQ ID NO: 3286 | EEHEE_rd4_0571.pdb |
| SEQ ID NO: 3287 | EHEE_rd4_0103.pdb |
| SEQ ID NO: 3288 | EEHEE_rd4_0884.pdb |
| SEQ ID NO: 3289 | EHEE_rd4_0483.pdb |
| SEQ ID NO: 3290 | EEHEE_rd3_0066.pdb |
| SEQ ID NO: 3291 | EHEE_rd4_0891.pdb |
| SEQ ID NO: 3292 | EHEE_rd4_0501.pdb |
| SEQ ID NO: 3293 | EHEE_rd4_0138.pdb |
| SEQ ID NO: 3294 | HHH_rd3_0082.pdb |
| SEQ ID NO: 3295 | HHH_rd4_0336.pdb |
| SEQ ID NO: 3296 | EEHEE_rd3_0944.pdb |
| SEQ ID NO: 3297 | EHEE_rd3_0073.pdb |
| SEQ ID NO: 3298 | HHH_rd1_0908.pdb |
| SEQ ID NO: 3299 | EEHEE_rd3_0025.pdb |
| SEQ ID NO: 3300 | EHEE_rd4_0511.pdb |
| SEQ ID NO: 3301 | HHH_rd4_0851.pdb |
| SEQ ID NO: 3302 | EEHEE_rd4_0794.pdb |
| SEQ ID NO: 3303 | HHH_rd1_0942.pdb |
| SEQ ID NO: 3304 | HHH_rd2_0146.pdb |
| SEQ ID NO: 3305 | HHH_rd3_0168.pdb |
| SEQ ID NO: 3306 | HHH_rd4_0995.pdb |
| SEQ ID NO: 3307 | EEHEE_rd4_0474.pdb |
| SEQ ID NO: 3308 | HHH_rd3_0067.pdb |
| SEQ ID NO: 3309 | EHEE_rd2_0022.pdb |
| SEQ ID NO: 3310 | HEEH_rd3_0080.pdb |
| SEQ ID NO: 3311 | EEHEE_rd4_0279.pdb |
| SEQ ID NO: 3312 | HEEH_rd3_0890.pdb |
| SEQ ID NO: 3313 | HEEH_rd3_0068.pdb |
| SEQ ID NO: 3314 | HEEH_rd3_0224.pdb |
| SEQ ID NO: 3315 | HHH_rd4_0700.pdb |
| SEQ ID NO: 3316 | HEEH_rd4_0162.pdb |
| SEQ ID NO: 3317 | EHEE_rd3_0021.pdb |
| SEQ ID NO: 3318 | HEEH_rd3_0154.pdb |
| SEQ ID NO: 3319 | EEHEE_rd3_0046.pdb |
| SEQ ID NO: 3320 | HEEH_rd3_0387.pdb |
| SEQ ID NO: 3321 | HHH_rd4_0410.pdb |
| SEQ ID NO: 3322 | EEHEE_rd3_1696.pdb |
| SEQ ID NO: 3323 | HEEH_rd2_0128.pdb |
| SEQ ID NO: 3324 | EHEE_rd4_0199.pdb |
| SEQ ID NO: 3325 | EHEE_rd1_0654.pdb |
| SEQ ID NO: 3326 | HEEH_rd3_0886.pdb |
| SEQ ID NO: 3327 | HEEH_rd3_1362.pdb |
| SEQ ID NO: 3328 | HHH_rd4_0496.pdb |
| SEQ ID NO: 3329 | EEHEE_rd4_0108.pdb |
| SEQ ID NO: 3330 | EEHEE_rd4_0254.pdb |
| SEQ ID NO: 3331 | EEHEE_rd4_0317.pdb |
| SEQ ID NO: 3332 | EHEE_rd4_0661.pdb |
| SEQ ID NO: 3333 | EHEE_rd1_0295.pdb |
| SEQ ID NO: 3334 | EEHEE_rd4_0915.pdb |
| SEQ ID NO: 3335 | HHH_rd4_0985.pdb |
| SEQ ID NO: 3336 | HHH_rd3_0187.pdb |
| SEQ ID NO: 3337 | EEHEE_rd3_1087.pdb |
| SEQ ID NO: 3338 | HEEH_rd4_0076.pdb |
| SEQ ID NO: 3339 | EEHEE_rd3_1198.pdb |
| SEQ ID NO: 3340 | EEHEE_rd4_0844.pdb |
| SEQ ID NO: 3341 | EHEE_rd4_0591.pdb |
| SEQ ID NO: 3342 | EEHEE_rd4_0985.pdb |
| SEQ ID NO: 3343 | HHH_rd3_0066.pdb |
| SEQ ID NO: 3344 | HHH_rd4_0924.pdb |
| SEQ ID NO: 3345 | HHH_rd3_0232.pdb |
| SEQ ID NO: 3346 | EHEE_rd2_0104.pdb |
| SEQ ID NO: 3347 | HHH_rd1_0730.pdb |
| SEQ ID NO: 3348 | EEHEE_rd4_0587.pdb |
| SEQ ID NO: 3349 | EEHEE_rd2_1166.pdb |
| SEQ ID NO: 3350 | EEHEE_rd4_0687.pdb |
| SEQ ID NO: 3351 | HHH_rd4_0783.pdb |
| SEQ ID NO: 3352 | HHH_rd1_0442.pdb |
| SEQ ID NO: 3353 | HHH_rd1_0512.pdb |
| SEQ ID NO: 3354 | EHEE_rd4_0469.pdb |
| SEQ ID NO: 3355 | HHH_rd4_0724.pdb |
| SEQ ID NO: 3356 | HHH_rd3_0025.pdb |
| SEQ ID NO: 3357 | EHEE_rd2_0069.pdb |
| SEQ ID NO: 3358 | EEHEE_rd3_1229.pdb |
| SEQ ID NO: 3359 | HHH_rd1_0494.pdb |
| SEQ ID NO: 3360 | HEEH_rd3_0484.pdb |
| SEQ ID NO: 3361 | EEHEE_rd3_0720.pdb |
| SEQ ID NO: 3362 | HHH_rd3_0217.pdb |
| SEQ ID NO: 3363 | HEEH_rd4_0175.pdb |
| SEQ ID NO: 3364 | EEHEE_rd3_0466.pdb |
| SEQ ID NO: 3365 | HHH_rd4_0430.pdb |
| SEQ ID NO: 3366 | EEHEE_rd3_0800.pdb |
| SEQ ID NO: 3367 | EEHEE_rd3_1252.pdb |
| SEQ ID NO: 3368 | HHH_rd1_0212.pdb |
| SEQ ID NO: 3369 | EEHEE_rd3_0252.pdb |
| SEQ ID NO: 3370 | EEHEE_rd3_1532.pdb |
| SEQ ID NO: 3371 | EHEE_rd4_0738.pdb |
| SEQ ID NO: 3372 | EEHEE_rd4_0987.pdb |
| SEQ ID NO: 3373 | EEHEE_rd4_0880.pdb |
| SEQ ID NO: 3374 | HEEH_rd3_1405.pdb |
| SEQ ID NO: 3375 | EEHEE_rd3_0388.pdb |
| SEQ ID NO: 3376 | EEHEE_rd3_0367.pdb |
| SEQ ID NO: 3377 | EEHEE_rd4_0389.pdb |
| SEQ ID NO: 3378 | EHEE_rd2_0827.pdb |
| SEQ ID NO: 3379 | EEHEE_rd3_1775.pdb |
| SEQ ID NO: 3380 | HHH_rd1_0796.pdb |
| SEQ ID NO: 3381 | HHH_rd1_0319.pdb |
| SEQ ID NO: 3382 | HEEH_rd3_1605.pdb |
| SEQ ID NO: 3383 | EEHEE_rd3_1462.pdb |
| SEQ ID NO: 3384 | EHEE_rd4_0593.pdb |
| SEQ ID NO: 3385 | EEHEE_rd4_0603.pdb |
| SEQ ID NO: 3386 | EEHEE_rd3_0369.pdb |
| SEQ ID NO: 3387 | HHH_rd1_0545.pdb |
| SEQ ID NO: 3388 | HEEH_rd2_0301.pdb |
| SEQ ID NO: 3389 | EHEE_rd2_1284.pdb |
| SEQ ID NO: 3390 | EHEE_rd4_0169.pdb |
| SEQ ID NO: 3391 | EEHEE_rd4_0942.pdb |
| SEQ ID NO: 3392 | EHEE_rd4_0957.pdb |
| SEQ ID NO: 3393 | HEEH_rd2_0192.pdb |
| SEQ ID NO: 3394 | EEHEE_rd4_0386.pdb |
| SEQ ID NO: 3395 | HEEH_rd3_0084.pdb |
| SEQ ID NO: 3396 | HEEH_rd2_0485.pdb |
| SEQ ID NO: 3397 | HEEH_rd3_0854.pdb |
| SEQ ID NO: 3398 | HHH_rd1_0515.pdb |
| SEQ ID NO: 3399 | EEHEE_rd4_0999.pdb |
| SEQ ID NO: 3400 | HEEH_rd3_1153.pdb |
| SEQ ID NO: 3401 | HHH_rd1_0771.pdb |
| SEQ ID NO: 3402 | EHEE_rd4_0665.pdb |
| SEQ ID NO: 3403 | HHH_rd3_0143.pdb |
| SEQ ID NO: 3404 | HHH_rd1_0276.pdb |
| SEQ ID NO: 3405 | EEHEE_rd4_0936.pdb |
| SEQ ID NO: 3406 | HEEH_rd4_0503.pdb |
| SEQ ID NO: 3407 | EHEE_rd3_0098.pdb |
| SEQ ID NO: 3408 | HHH_rd1_0845.pdb |
| SEQ ID NO: 3409 | EHEE_rd3_0177.pdb |
| SEQ ID NO: 3410 | EEHEE_rd3_0411.pdb |
| SEQ ID NO: 3411 | EHEE_rd2_1132.pdb |
| SEQ ID NO: 3412 | HHH_rd4_0976.pdb |
| SEQ ID NO: 3413 | EEHEE_rd3_1825.pdb |
| SEQ ID NO: 3414 | EHEE_rd2_1103.pdb |
| SEQ ID NO: 3415 | HEEH_rd3_1614.pdb |
| SEQ ID NO: 3416 | EHEE_rd4_0863.pdb |
| SEQ ID NO: 3417 | HHH_rd1_0055.pdb |
| SEQ ID NO: 3418 | EHEE_rd4_0766.pdb |
| SEQ ID NO: 3419 | EEHEE_rd3_0422.pdb |
| SEQ ID NO: 3420 | HHH_rd3_0158.pdb |
| SEQ ID NO: 3421 | EEHEE_rd4_0722.pdb |
| SEQ ID NO: 3422 | HHH_rd1_0027.pdb |
| SEQ ID NO: 3423 | EEHEE_rd4_0849.pdb |
| SEQ ID NO: 3424 | EEHEE_rd4_0556.pdb |
| SEQ ID NO: 3425 | EEHEE_rd4_0246.pdb |
| SEQ ID NO: 3426 | EHEE_rd4_0277.pdb |
| SEQ ID NO: 3427 | HHH_rd1_0600.pdb |
| SEQ ID NO: 3428 | EEHEE_rd2_0853.pdb |
| SEQ ID NO: 3429 | EEHEE_rd3_1718.pdb |
| SEQ ID NO: 3430 | HEEH_rd3_0573.pdb |
| SEQ ID NO: 3431 | EEHEE_rd3_1496.pdb |
| SEQ ID NO: 3432 | EHEE_rd4_0619.pdb |
| SEQ ID NO: 3433 | HHH_rd1_0445.pdb |
| SEQ ID NO: 3434 | EEHEE_rd3_0691.pdb |
| SEQ ID NO: 3435 | EHEE_rd4_0989.pdb |
| SEQ ID NO: 3436 | EEHEE_rd4_0993.pdb |
| SEQ ID NO: 3437 | EEHEE_rd3_0559.pdb |
| SEQ ID NO: 3438 | EHEE_rd3_0246.pdb |
| SEQ ID NO: 3439 | HEEH_rd3_0148.pdb |
| SEQ ID NO: 3440 | HEEH_rd3_1274.pdb |
| SEQ ID NO: 3441 | EEHEE_rd4_0561.pdb |
| SEQ ID NO: 3442 | HEEH_rd4_0249.pdb |
| SEQ ID NO: 3443 | HEEH_rd4_0962.pdb |
| SEQ ID NO: 3444 | EEHEE_rd4_0292.pdb |
| SEQ ID NO: 3445 | EHEE_rd4_0482.pdb |
| SEQ ID NO: 3446 | HHH_rd1_0147.pdb |
| SEQ ID NO: 3447 | HHH_rd1_0146.pdb |
| SEQ ID NO: 3448 | EHEE_rd2_0150.pdb |
| SEQ ID NO: 3449 | EHEE_rd2_0015.pdb |
| SEQ ID NO: 3450 | EHEE_rd4_0830.pdb |
| SEQ ID NO: 3451 | HEEH_rd3_0179.pdb |
| SEQ ID NO: 3452 | EEHEE_rd3_1663.pdb |
| SEQ ID NO: 3453 | EHEE_rd4_0526.pdb |
| SEQ ID NO: 3454 | EHEE_rd2_1088.pdb |
| SEQ ID NO: 3455 | HEEH_rd2_0432.pdb |
| SEQ ID NO: 3456 | HEEH_rd3_1798.pdb |
| SEQ ID NO: 3457 | HHH_rd1_0596.pdb |
| SEQ ID NO: 3458 | EHEE_rd2_0998.pdb |
| SEQ ID NO: 3459 | EEHEE_rd3_1089.pdb |
| SEQ ID NO: 3460 | HEEH_rd4_0035.pdb |
| SEQ ID NO: 3461 | EEHEE_rd4_0501.pdb |
| SEQ ID NO: 3462 | EHEE_rd2_1087.pdb |
| SEQ ID NO: 3463 | EHEE_rd4_0106.pdb |
| SEQ ID NO: 3464 | EEHEE_rd3_0904.pdb |
| SEQ ID NO: 3465 | EHEE_rd2_1066.pdb |
| SEQ ID NO: 3466 | EHEE_rd4_0986.pdb |
| SEQ ID NO: 3467 | EHEE_rd3_0116.pdb |
| SEQ ID NO: 3468 | EHEE_rd4_0316.pdb |
| SEQ ID NO: 3469 | EEHEE_rd4_0440.pdb |
| SEQ ID NO: 3470 | EHEE_rd4_0443.pdb |
| SEQ ID NO: 3471 | EEHEE_rd4_0889.pdb |
| SEQ ID NO: 3472 | HEEH_rd1_0727.pdb |
| SEQ ID NO: 3473 | EHEE_rd4_0218.pdb |
| SEQ ID NO: 3474 | EHEE_rd4_0389.pdb |
| SEQ ID NO: 3475 | EHEE_rd3_0049.pdb |
| SEQ ID NO: 3476 | EEHEE_rd4_0825.pdb |
| SEQ ID NO: 3477 | EHEE_rd1_0307.pdb |
| SEQ ID NO: 3478 | HHH_rd1_0016.pdb |
| SEQ ID NO: 3479 | EEHEE_rd3_1247.pdb |
| SEQ ID NO: 3480 | EEHEE_rd3_0201.pdb |
| SEQ ID NO: 3481 | HHH_rd1_0405.pdb |
| SEQ ID NO: 3482 | HHH_rd1_0132.pdb |
| SEQ ID NO: 3483 | EEHEE_rd4_0732.pdb |
| SEQ ID NO: 3484 | EHEE_rd4_0301.pdb |
| SEQ ID NO: 3485 | EHEE_rd4_0409.pdb |
| SEQ ID NO: 3486 | EEHEE_rd3_1786.pdb |
| SEQ ID NO: 3487 | HHH_rd1_0228.pdb |
| SEQ ID NO: 3488 | EEHEE_rd4_0443.pdb |
| SEQ ID NO: 3489 | EEHEE_rd3_1704.pdb |
| SEQ ID NO: 3490 | EEHEE_rd4_0708.pdb |
| SEQ ID NO: 3491 | HHH_rd1_0199.pdb |
| SEQ ID NO: 3492 | HEEH_rd3_1358.pdb |
| SEQ ID NO: 3493 | HEEH_rd4_0364.pdb |
| SEQ ID NO: 3494 | HHH_rd1_0467.pdb |
| SEQ ID NO: 3495 | EHEE_rd4_0143.pdb |
| SEQ ID NO: 3496 | EHEE_rd4_0984.pdb |
| SEQ ID NO: 3497 | HHH_rd4_0749.pdb |
| SEQ ID NO: 3498 | EEHEE_rd4_0853.pdb |
| SEQ ID NO: 3499 | HHH_rd1_0679.pdb |
| SEQ ID NO: 3500 | EEHEE_rd4_0457.pdb |
| SEQ ID NO: 3501 | EHEE_rd4_0269.pdb |
| SEQ ID NO: 3502 | HHH_rd1_0490.pdb |
| SEQ ID NO: 3503 | HEEH_rd2_0726.pdb |
| SEQ ID NO: 3504 | HEEH_rd3_0874.pdb |
| SEQ ID NO: 3505 | EEHEE_rd4_0536.pdb |
| SEQ ID NO: 3506 | HEEH_rd3_0677.pdb |
| SEQ ID NO: 3507 | EEHEE_rd4_0673.pdb |
| SEQ ID NO: 3508 | HEEH_rd3_1466.pdb |
| SEQ ID NO: 3509 | EEHEE_rd4_0419.pdb |
| SEQ ID NO: 3510 | EEHEE_rd3_1356.pdb |
| SEQ ID NO: 3511 | HEEH_rd4_0898.pdb |
| SEQ ID NO: 3512 | HHH_rd1_0683.pdb |
| SEQ ID NO: 3513 | HHH_rd2_0099.pdb |
| SEQ ID NO: 3514 | EHEE_rd1_0025.pdb |
| SEQ ID NO: 3515 | HHH_rd4_0718.pdb |
| SEQ ID NO: 3516 | HHH_rd1_0130.pdb |
| SEQ ID NO: 3517 | EHEE_rd1_0926.pdb |
| SEQ ID NO: 3518 | HEEH_rd4_0146.pdb |
| SEQ ID NO: 3519 | EEHEE_rd4_0787.pdb |
| SEQ ID NO: 3520 | HHH_rd1_0129.pdb |
| SEQ ID NO: 3521 | EEHEE_rd3_0064.pdb |
| SEQ ID NO: 3522 | EEHEE_rd4_0919.pdb |
| SEQ ID NO: 3523 | EHEE_rd4_0854.pdb |
| SEQ ID NO: 3524 | EEHEE_rd4_0201.pdb |
| SEQ ID NO: 3525 | EEHEE_rd3_1521.pdb |
| SEQ ID NO: 3526 | EEHEE_rd3_0398.pdb |
| SEQ ID NO: 3527 | EEHEE_rd3_0979.pdb |
| SEQ ID NO: 3528 | EEHEE_rd4_0041.pdb |
| SEQ ID NO: 3529 | HHH_rd4_0555.pdb |
| SEQ ID NO: 3530 | HHH_rd4_0825.pdb |
| SEQ ID NO: 3531 | EHEE_rd2_0571.pdb |
| SEQ ID NO: 3532 | EHEE_rd4_0120.pdb |
| SEQ ID NO: 3533 | HHH_rd1_0077.pdb |
| SEQ ID NO: 3534 | EHEE_rd4_0627.pdb |
| SEQ ID NO: 3535 | EEHEE_rd4_0643.pdb |
| SEQ ID NO: 3536 | EEHEE_rd4_0654.pdb |
| SEQ ID NO: 3537 | HEEH_rd3_0701.pdb |
| SEQ ID NO: 3538 | HEEH_rd4_0400.pdb |
| SEQ ID NO: 3539 | EEHEE_rd3_0739.pdb |
| SEQ ID NO: 3540 | EEHEE_rd3_0554.pdb |
| SEQ ID NO: 3541 | EEHEE_rd4_0423.pdb |
| SEQ ID NO: 3542 | EHEE_rd2_0546.pdb |
| SEQ ID NO: 3543 | HEEH_rd3_0362.pdb |
| SEQ ID NO: 3544 | EEHEE_rd3_1659.pdb |
| SEQ ID NO: 3545 | EEHEE_rd3_0535.pdb |
| SEQ ID NO: 3546 | HHH_rd1_0352.pdb |
| SEQ ID NO: 3547 | EEHEE_rd3_1044.pdb |
| SEQ ID NO: 3548 | EHEE_rd3_0048.pdb |
| SEQ ID NO: 3549 | HEEH_rd3_1323.pdb |
| SEQ ID NO: 3550 | EEHEE_rd3_0092.pdb |
| SEQ ID NO: 3551 | EHEE_rd1_0357.pdb |
| SEQ ID NO: 3552 | EEHEE_rd4_0909.pdb |
| SEQ ID NO: 3553 | EEHEE_rd3_1535.pdb |
| SEQ ID NO: 3554 | EEhEE_rd2_0753.pdb |
| SEQ ID NO: 3555 | EEHEE_rd4_0815.pdb |
| SEQ ID NO: 3556 | EEHEE_rd3_0915.pdb |
| SEQ ID NO: 3557 | EEHEE_rd3_0200.pdb |
| SEQ ID NO: 3558 | HEEH_rd2_0244.pdb |
| SEQ ID NO: 3559 | HEEH_rd4_0709.pdb |
| SEQ ID NO: 3560 | EHEE_rd4_0870.pdb |
| SEQ ID NO: 3561 | EEHEE_rd4_0744.pdb |
| SEQ ID NO: 3562 | EHEE_rd2_1292.pdb |
| SEQ ID NO: 3563 | HHH_rd1_0628.pdb |
| SEQ ID NO: 3564 | HEEH_rd3_1528.pdb |
| SEQ ID NO: 3565 | EEHEE_rd4_0755.pdb |
| SEQ ID NO: 3566 | EHEE_rd4_0807.pdb |
| SEQ ID NO: 3567 | HHH_rd4_0678.pdb |
| SEQ ID NO: 3568 | EHEE_rd3_0132.pdb |
| SEQ ID NO: 3569 | EEHEE_rd4_0885.pdb |
| SEQ ID NO: 3570 | EEHEE_rd4_0262.pdb |
| SEQ ID NO: 3571 | HHH_rd4_0726.pdb |
| SEQ ID NO: 3572 | EEHEE_rd4_0837.pdb |
| SEQ ID NO: 3573 | HHH_rd2_0092.pdb |
| SEQ ID NO: 3574 | EEHEE_rd3_1425.pdb |
| SEQ ID NO: 3575 | HEEH_rd4_0349.pdb |
| SEQ ID NO: 3576 | EEHEE_rd3_0627.pdb |
| SEQ ID NO: 3577 | HHH_rd4_0761.pdb |
| SEQ ID NO: 3578 | HEEH_rd3_0764.pdb |
| SEQ ID NO: 3579 | HEEH_rd4_0276.pdb |
| SEQ ID NO: 3580 | EHEE_rd4_0695.pdb |
| SEQ ID NO: 3581 | EEHEE_rd3_0534.pdb |
| SEQ ID NO: 3582 | HHH_rd2_0027.pdb |
| SEQ ID NO: 3583 | EHEE_rd2_0493.pdb |
| SEQ ID NO: 3584 | HHH_rd1_0312.pdb |
| SEQ ID NO: 3585 | HHH_rd1_0042.pdb |
| SEQ ID NO: 3586 | HHH_rd3_0077.pdb |
| SEQ ID NO: 3587 | HHH_rd1_0462.pdb |
| SEQ ID NO: 3588 | EEHEE_rd3_0386.pdb |
| SEQ ID NO: 3589 | EEHEE_rd3_0926.pdb |
| SEQ ID NO: 3590 | HEEH_rd4_0011.pdb |
| SEQ ID NO: 3591 | EHEE_rd2_0543.pdb |
| SEQ ID NO: 3592 | EEHEE_rd4_0823.pdb |
| SEQ ID NO: 3593 | EHEE_rd2_0817.pdb |
| SEQ ID NO: 3594 | EEHEE_rd4_0461.pdb |
| SEQ ID NO: 3595 | EEHEE_rd3_0886.pdb |
| SEQ ID NO: 3596 | HHH_rd4_0845.pdb |
| SEQ ID NO: 3597 | EEHEE_rd4_0564.pdb |
| SEQ ID NO: 3598 | EEHEE_rd3_1688.pdb |
| SEQ ID NO: 3599 | EHEE_rd4_0497.pdb |
| SEQ ID NO: 3600 | EEHEE_rd4_0925.pdb |
| SEQ ID NO: 3601 | EHEE_rd2_0252.pdb |
| SEQ ID NO: 3602 | HHH_rd4_0473.pdb |
| SEQ ID NO: 3603 | EHEE_rd2_0541.pdb |
| SEQ ID NO: 3604 | EHEE_rd4_0744.pdb |
| SEQ ID NO: 3605 | EEHEE_rd2_0965.pdb |
| SEQ ID NO: 3606 | EEHEE_rd4_0554.pdb |
| SEQ ID NO: 3607 | EEHEE_rd3_1047.pdb |
| SEQ ID NO: 3608 | HHH_rd1_0211.pdb |
| SEQ ID NO: 3609 | HHH_rd1_0128.pdb |
| SEQ ID NO: 3610 | HHH_rd4_6214.pdb |
| SEQ ID NO: 3611 | EEHEE_rd2_0925.pdb |
| SEQ ID NO: 3612 | HHH_rd1_0919.pdb |
| SEQ ID NO: 3613 | EEHEE_rd4_0305.pdb |
| SEQ ID NO: 3614 | HEEH_rd2_0682.pdb |
| SEQ ID NO: 3615 | EEHEE_rd4_0330.pdb |
| SEQ ID NO: 3616 | EEHEE_rd2_0959.pdb |
| SEQ ID NO: 3617 | EHEE_rd3_0131.pdb |
| SEQ ID NO: 3618 | EEHEE_rd3_1357.pdb |
| SEQ ID NO: 3619 | EEHEE_rd3_0340.pdb |
| SEQ ID NO: 3620 | HHH_rd1_0189.pdb |
| SEQ ID NO: 3621 | EHEE_rd4_0199.pdb |
| SEQ ID NO: 3622 | EEHEE_rd4_0930.pdb |
| SEQ ID NO: 3623 | HHH_rd1_0999.pdb |
| SEQ ID NO: 3624 | EEHEE_rd3_0019.pdb |
| SEQ ID NO: 3625 | EHEE_rd4_0520.pdb |
| SEQ ID NO: 3626 | EHEE_rd2_0802.pdb |
| SEQ ID NO: 3627 | EEHEE_rd4_0192.pdb |
| SEQ ID NO: 3628 | EHEE_rd4_0032.pdb |
| SEQ ID NO: 3629 | EHEE_rd4_0802.pdb |
| SEQ ID NO: 3630 | EEHEE_rd3_0649.pdb |
| SEQ ID NO: 3631 | HEEH_rd3_0830.pdb |
| SEQ ID NO: 3632 | EEHEE_rd4_0402.pdb |
| SEQ ID NO: 3633 | EHEE_rd1_0326.pdb |
| SEQ ID NO: 3634 | HHH_rd1_0157.pdb |
| SEQ ID NO: 3635 | EHEE_rd4_0178.pdb |
| SEQ ID NO: 3636 | EEHEE_rd3_1029.pdb |
| SEQ ID NO: 3637 | EEHEE_rd4_0574.pdb |
| SEQ ID NO: 3638 | HHH_rd1_0986.pdb |
| SEQ ID NO: 3639 | EEHEE_rd4_0916.pdb |
| SEQ ID NO: 3640 | EHEE_rd4_0721.pdb |
| SEQ ID NO: 3641 | EEHEE_rd4_0047.pdb |
| SEQ ID NO: 3642 | HEEH_rd4_0197.pdb |
| SEQ ID NO: 3643 | EEHEE_rd4_0851.pdb |
| SEQ ID NO: 3644 | EEHEE_rd3_0973.pdb |
| SEQ ID NO: 3645 | HEEH_rd4_0303.pdb |
| SEQ ID NO: 3646 | HEEH_rd4_0461.pdb |
| SEQ ID NO: 3647 | EEHEE_rd4_0872.pdb |
| SEQ ID NO: 3648 | HHH_rd1_0069.pdb |
| SEQ ID NO: 3649 | EEHEE_rd4_0569.pdb |
| SEQ ID NO: 3650 | EEHEE_rd3_0589.pdb |
| SEQ ID NO: 3651 | EHEE_rd2_0723.pdb |
| SEQ ID NO: 3652 | HHH_rd4_0897.pdb |
| SEQ ID NO: 3653 | EHEE_rd4_0888.pdb |
| SEQ ID NO: 3654 | HEEH_rd4_0596.pdb |
| SEQ ID NO: 3655 | EHEE_rd3_0076.pdb |
| SEQ ID NO: 3656 | HHH_rd1_0665.pdb |
| SEQ ID NO: 3657 | HHH_rd1_p448.pdb |
| SEQ ID NO: 3658 | EHEE_rd2_1133.pdb |
| SEQ ID NO: 3659 | EEHEE_rd4_0604.pdb |
| SEQ ID NO: 3660 | EHEE_rd4_0615.pdb |
| SEQ ID NO: 3661 | EEHEE_rd4_0962.pdb |
| SEQ ID NO: 3662 | EEHEE_rd1_0123.pdb |
| SEQ ID NO: 3663 | EEHEE_rd3_1448.pdb |
| SEQ ID NO: 3664 | EHEE_rd1_0257.pdb |
| SEQ ID NO: 3665 | EEHEE_rd3_0498.pdb |
| SEQ ID NO: 3666 | EEHEE_rd4_0760.pdb |
| SEQ ID NO: 3667 | HEEH_rd3_0997.pdb |
| SEQ ID NO: 3668 | HEEH_rd1_0959.pdb |
| SEQ ID NO: 3669 | EEHEE_rd3_0851.pdb |
| SEQ ID NO: 3670 | HEEH_rd4_0401.pdb |
| SEQ ID NO: 3671 | HEEH_rd4_0316.pdb |
| SEQ ID NO: 3672 | HEEH_rd2_1070.pdb |
| SEQ ID NO: 3673 | EHEE_rd4_0376.pdb |
| SEQ ID NO: 3674 | EHEE_rd2_p325.pdb |
| SEQ ID NO: 3675 | HEEH_rd3_0074.pdb |
| SEQ ID NO: 3676 | EHEE_rd2_1152.pdb |
| SEQ ID NO: 3677 | EEHEE_rd4_0248.pdb |
| SEQ ID NO: 3678 | EHEE_rd2_0751.pdb |
| SEQ ID NO: 3679 | EEHEE_rd4_0625.pdb |
| SEQ ID NO: 3680 | EHEE_rd4_0257.pdb |
| SEQ ID NO: 3681 | HEEH_rd4_0010.pdb |
| SEQ ID NO: 3682 | HEEH_rd4_0607.pdb |
| SEQ ID NO: 3683 | EHEE_rd4_0635.pdb |
| SEQ ID NO: 3684 | EHEE_rd4_0100.pdb |
| SEQ ID NO: 3685 | EHEE_rd4_0131.pdb |
| SEQ ID NO: 3686 | HHH_rd4_0297.pdb |
| SEQ ID NO: 3687 | HEEH_rd4_0081.pdb |
| SEQ ID NO: 3688 | EEHEE_rd4_0958.pdb |
| SEQ ID NO: 3689 | EHEE_rd4_0002.pdb |
| SEQ ID NO: 3690 | HEEH_rd4_0222.pdb |
| SEQ ID NO: 3691 | EEHEE_rd3_0050.pdb |
| SEQ ID NO: 3692 | EEHEE_rd3_1212.pdb |
| SEQ ID NO: 3693 | HEEH_rd2_1111.pdb |
| SEQ ID NO: 3694 | HEEH_rd3_0756.pdb |
| SEQ ID NO: 3695 | EEHEE_rd3_0484.pdb |
| SEQ ID NO: 3696 | EEHEE_rd3_0347.pdb |
| SEQ ID NO: 3697 | EHEE_rd2_0950.pdb |
| SEQ ID NO: 3698 | EEHEE_rd3_0196.pdb |
| SEQ ID NO: 3699 | EHEE_rd2_0410.pdb |
| SEQ ID NO: 3700 | EEHEE_rd4_0666.pdb |
| SEQ ID NO: 3701 | EEHEE_rd4_0584.pdb |
| SEQ ID NO: 3702 | EEHEE_rd3_1011.pdb |
| SEQ ID NO: 3703 | EEHEE_rd3_0527.pdb |
| SEQ ID NO: 3704 | EEHEE_rd4_0834.pdb |
| SEQ ID NO: 3705 | EEHEE_rd4_0494.pdb |
| SEQ ID NO: 3706 | HEEH_rd2_1223.pdb |
| SEQ ID NO: 3707 | EEHEE_rd2_0242.pdb |
| SEQ ID NO: 3708 | HHH_rd2_0164.pdb |
| SEQ ID NO: 3709 | HHH_rd2_0168.pdb |
| SEQ ID NO: 3710 | EHEE_rd2_0757.pdb |
| SEQ ID NO: 3711 | EEHEE_rd3_1233.pdb |
| SEQ ID NO: 3712 | EHEE_rd2_1173.pdb |
| SEQ ID NO: 3713 | HEEH_rd3_1034.pdb |
| SEQ ID NO: 3714 | EEHEE_rd3_0497.pdb |
| SEQ ID NO: 3715 | HEEH_rd4_0342.pdb |
| SEQ ID NO: 3716 | EHEE_rd4_0568.pdb |
| SEQ ID NO: 3717 | EEHEE_rd3_0920.pdb |
| SEQ ID NO: 3718 | EEHEE_rd3_0854.pdb |
| SEQ ID NO: 3719 | EEHEE_rd4_0707.pdb |
| SEQ ID NO: 3720 | HEEH_rd3_0188.pdb |
| SEQ ID NO: 3721 | HHH_rd1_0430.pdb |
| SEQ ID NO: 3722 | EEHEE_rd3_1325.pdb |
| SEQ ID NO: 3723 | EEHEE_rd3_1172.pdb |
| SEQ ID NO: 3724 | HEEH_rd4_0680.pdb |
| SEQ ID NO: 3725 | EHEE_rd4_0137.pdb |
| SEQ ID NO: 3726 | EEHEE_rd4_0874.pdb |
| SEQ ID NO: 3727 | EEHEE_rd3_1192.pdb |
| SEQ ID NO: 3728 | EEHEE_rd3_1181.pdb |
| SEQ ID NO: 3729 | EEHEE_rd4_0481.pdb |
| SEQ ID NO: 3730 | HHH_rd1_0387.pdb |
| SEQ ID NO: 3731 | HHH_rd1_0232.pdb |
| SEQ ID NO: 3732 | EEHEE_rd3_0754.pdb |
| SEQ ID NO: 3733 | EHEE_rd3_0166.pdb |
| SEQ ID NO: 3734 | EHEE_rd4_0274.pdb |
| SEQ ID NO: 3735 | EHEE_rd3_0227.pdb |
| SEQ ID NO: 3736 | EEHEE_rd3_1583.pdb |
| SEQ ID NO: 3737 | EHEE_rd4_0946.pdb |
| SEQ ID NO: 3738 | HHH_rd1_0781.pdb |
| SEQ ID NO: 3739 | EHEE_rd4_0659.pdb |
| SEQ ID NO: 3740 | EEHEE_rd3_0264.pdb |
| SEQ ID NO: 3741 | EEHEE_rd3_1380.pdb |
| SEQ ID NO: 3742 | EHEE_rd4_0928.pdb |
| SEQ ID NO: 3743 | EEHEE_rd3_0719.pdb |
| SEQ ID NO: 3744 | EEHEE_rd4_0928.pdb |
| SEQ ID NO: 3745 | EHEE_rd4_0632.pdb |
| SEQ ID NO: 3746 | EEHEE_rd4_0628.pdb |
| SEQ ID NO: 3747 | EHEE_rd4_0249.pdb |
| SEQ ID NO: 3748 | HHH_rd3_0039.pdb |
| SEQ ID NO: 3749 | HEEH_rd1_0620.pdb |
| SEQ ID NO: 3750 | EHEE_rd4_0395.pdb |
| SEQ ID NO: 3751 | HEEH_rd3_0061.pdb |
| SEQ ID NO: 3752 | EHEE_rd3_0243.pdb |
| SEQ ID NO: 3753 | HHH_rd1_0891.pdb |
| SEQ ID NO: 3754 | EEHEE_rd4_0911.pdb |
| SEQ ID NO: 3755 | HHH_rd1_0856.pdb |
| SEQ ID NO: 3756 | EEHEE_rd4_0509.pdb |
| SEQ ID NO: 3757 | EEHEE_rd4_0746.pdb |
| SEQ ID NO: 3758 | EEHEE_rd3_0415.pdb |
| SEQ ID NO: 3759 | EEHEE_rd4_0720.pdb |
| SEQ ID NO: 3760 | EEHEE_rd3_0391.pdb |
| SEQ ID NO: 3761 | EHEE_rd4_0542.pdb |
| SEQ ID NO: 3762 | EHEE_rd4_0309.pdb |
| SEQ ID NO: 3763 | EHEE_rd2_1251.pdb |
| SEQ ID NO: 3764 | EHEE_rd4_0745.pdb |
| SEQ ID NO: 3765 | EEHEE_rd3_0597.pdb |
| SEQ ID NO: 3766 | EEHEE_rd3_0029.pdb |
| SEQ ID NO: 3767 | EEHEE_rd4_0335.pdb |
| SEQ ID NO: 3768 | EEHEE_rd4_0619.pdb |
| SEQ ID NO: 3769 | HHH_rd1_0109.pdb |
| SEQ ID NO: 3770 | EEHEE_rd3_0065.pdb |
| SEQ ID NO: 3771 | HHH_rd4_0909.pdb |
| SEQ ID NO: 3772 | HHH_rd1_0563.pdb |
| SEQ ID NO: 3773 | EEHEE_rd3_0185.pdb |
| SEQ ID NO: 3774 | EEHEE_rd3_1157.pdb |
| SEQ ID NO: 3775 | EEHEE_rd4_0622.pdb |
| SEQ ID NO: 3776 | HEEH_rd2_1299.pdb |
| SEQ ID NO: 3777 | HEEH_rd3_0286.pdb |
| SEQ ID NO: 3778 | HHH_rd1_0226.pdb |
| SEQ ID NO: 3779 | EHEE_rd4_0804.pdb |
| SEQ ID NO: 3780 | HHH_rd4_0499.pdb |
| SEQ ID NO: 3781 | EHEE_rd3_0007.pdb |
| SEQ ID NO: 3782 | EEHEE_rd4_0473.pdb |
| SEQ ID NO: 3783 | EEHEE_rd3_0993.pdb |
| SEQ ID NO: 3784 | HHH_rd2_0147.pdb |
| SEQ ID NO: 3785 | EEHEE_rd3_0936.pdb |
| SEQ ID NO: 3786 | EEHEE_rd3_0779.pdb |
| SEQ ID NO: 3787 | HHH_rd4_0545.pdb |
| SEQ ID NO: 3788 | HHH_rd4_0483.pdb |
| SEQ ID NO: 3789 | HHH_rd3_0220.pdb |
| SEQ ID NO: 3790 | EHEE_rd4_0624.pdb |
| SEQ ID NO: 3791 | EEHEE_rd4_0385.pdb |
| SEQ ID NO: 3792 | EHEE_rd4_0606.pdb |
| SEQ ID NO: 3793 | EEHEE_rd4_0588.pdb |
| SEQ ID NO: 3794 | EEHEE_rd4_0949.pdb |
| SEQ ID NO: 3795 | EEHEE_rd3_0845.pdb |
| SEQ ID NO: 3796 | HEEH_rd2_0604.pdb |
| SEQ ID NO: 3797 | EEHEE_rd3_1721.pdb |
| SEQ ID NO: 3798 | HEEH_rd4_0065.pdb |
| SEQ ID NO: 3799 | HEEH_rd4_0060.pdb |
| SEQ ID NO: 3800 | HHH_rd1_0964.pdb |
| SEQ ID NO: 3801 | EEHEE_rd3_0384.pdb |
| SEQ ID NO: 3802 | HEEH_rd3_0666.pdb |
| SEQ ID NO: 3803 | HEEH_rd3_0462.pdb |
| SEQ ID NO: 3804 | HEEH_rd3_0035.pdb |
| SEQ ID NO: 3805 | EEHEE_rd4_0546.pdb |
| SEQ ID NO: 3806 | HEEH_rd3_0617.pdb |
| SEQ ID NO: 3807 | EEHEE_rd4_0600.pdb |
| SEQ ID NO: 3808 | EHEE_rd4_0933.pdb |
| SEQ ID NO: 3809 | EHEE_rd4_0641.pdb |
| SEQ ID NO: 3810 | EEHEE_rd4_0171.pdb |
| SEQ ID NO: 3811 | HHH_rd1_0116.pdb |
| SEQ ID NO: 3812 | HHH_rd1_0134.pdb |
| SEQ ID NO: 3813 | EHEE_rd4_0184.pdb |
| SEQ ID NO: 3814 | EHEE_rd2_1175.pdb |
| SEQ ID NO: 3815 | EEHEE_rd4_0530.pdb |
| SEQ ID NO: 3816 | EEHEE_rd3_0791.pdb |
| SEQ ID NO: 3817 | EHEE_rd4_0258.pdb |
| SEQ ID NO: 3818 | EHEE_rd4_0963.pdb |
| SEQ ID NO: 3819 | EEHEE_rd3_1283.pdb |
| SEQ ID NO: 3820 | HHH_rd1_0163.pdb |
| SEQ ID NO: 3821 | HHH_rd1_0977.pdb |
| SEQ ID NO: 3822 | EHEE_rd2_0388.pdb |
| SEQ ID NO: 3823 | HHH_rd4_0258.pdb |
| SEQ ID NO: 3824 | HHH_rd3_0149.pdb |
| SEQ ID NO: 3825 | EEHEE_rd4_0035.pdb |
| SEQ ID NO: 3826 | HEEH_rd3_1762.pdb |
| SEQ ID NO: 3827 | HHH_rd1_0831.pdb |
| SEQ ID NO: 3828 | EHEE_rd1_0742.pdb |
| SEQ ID NO: 3829 | EHEE_rd3_0060.pdb |
| SEQ ID NO: 3830 | EEHEE_rd4_0946.pdb |
| SEQ ID NO: 3831 | EHEE_rd2_0854.pdb |
| SEQ ID NO: 3832 | EEHEE_rd3_0917.pdb |
| SEQ ID NO: 3833 | EHEE_rd2_0371.pdb |
| SEQ ID NO: 3834 | EHEE_rd4_0676.pdb |
| SEQ ID NO: 3835 | EHEE_rd4_0736.pdb |
| SEQ ID NO: 3836 | HEEH_rd4_0363.pdb |
| SEQ ID NO: 3837 | EEHEE_rd4_0900.pdb |
| SEQ ID NO: 3838 | HEEH_rd4_0361.pdb |
| SEQ ID NO: 3839 | EHEE_rd2_0811.pdb |
| SEQ ID NO: 3840 | HHH_rd4_0591.pdb |
| SEQ ID NO: 3841 | EEHEE_rd4_0634.pdb |
| SEQ ID NO: 3842 | EHEE_rd3_0155.pdb |
| SEQ ID NO: 3843 | EEHEE_rd3_0488.pdb |
| SEQ ID NO: 3844 | HEEH_rd3_0405.pdb |
| SEQ ID NO: 3845 | EEHEE_rd3_1127.pdb |
| SEQ ID NO: 3846 | EEHEE_rd4_0940.pdb |
| SEQ ID NO: 3847 | EHEE_rd4_0704.pdb |
| SEQ ID NO: 3848 | EHEE_rd4_0926.pdb |
| SEQ ID NO: 3849 | EEHEE_rd4_0480.pdb |
| SEQ ID NO: 3850 | EEHEE_rd4_0768.pdb |
| SEQ ID NO: 3851 | HHH_rd1_0156.pdb |
| SEQ ID NO: 3852 | EEHEE_rd4_0926.pdb |
| SEQ ID NO: 3853 | EHEE_rd4_0903.pdb |
| SEQ ID NO: 3854 | HEEH_rd4_0003.pdb |
| SEQ ID NO: 3855 | HEEH_rd4_0568.pdb |
| SEQ ID NO: 3856 | EEHEE_rd4_0726.pdb |
| SEQ ID NO: 3857 | HEEH_rd3_0546.pdb |
| SEQ ID NO: 3858 | HHH_rd1_0513.pdb |
| SEQ ID NO: 3859 | HEEH_rd4_0435.pdb |
| SEQ ID NO: 3860 | HEEH_rd3_0528.pdb |
| SEQ ID NO: 3861 | HEEH_rd1_0169.pdb |
| SEQ ID NO: 3862 | EHEE_rd4_0800.pdb |
| SEQ ID NO: 3863 | HEEH_rd3_0167.pdb |
| SEQ ID NO: 3864 | EEHEE_rd3_0667.pdb |
| SEQ ID NO: 3865 | HHH_rd1_0553.pdb |
| SEQ ID NO: 3866 | HHH_rd1_0253.pdb |
| SEQ ID NO: 3867 | EHEE_rd2_0385.pdb |
| SEQ ID NO: 3868 | EHEE_rd4_0118.pdb |
| SEQ ID NO: 3869 | EEHEE_rd3_0815.pdb |
| SEQ ID NO: 3870 | HEEH_rd3_0678.pdb |
| SEQ ID NO: 3871 | HHH_rd3_0222.pdb |
| SEQ ID NO: 3872 | EHEE_rd4_0386.pdb |
| SEQ ID NO: 3873 | HHH_rd1_0394.pdb |
| SEQ ID NO: 3874 | EEHEE_rd2_1168.pdb |
| SEQ ID NO: 3875 | EHEE_rd4_0393.pdb |
| SEQ ID NO: 3876 | EEHEE_rd4_0859.pdb |
| SEQ ID NO: 3877 | HEEH_rd4_0121.pdb |
| SEQ ID NO: 3878 | EHEE_rd4_0034.pdb |
| SEQ ID NO: 3879 | HHH_rd2_0167.pdb |
| SEQ ID NO: 3880 | HEEH_rd2_0293.pdb |
| SEQ ID NO: 3881 | HEEH_rd3_1220.pdb |
| SEQ ID NO: 3882 | EEHEE_rd3_0808.pdb |
| SEQ ID NO: 3883 | HEEH_rd4_0887.pdb |
| SEQ ID NO: 3884 | EEHEE_rd2_0036.pdb |
| SEQ ID NO: 3885 | EEHEE_rd1_0294.pdb |
| SEQ ID NO: 3886 | EEHEE_rd3_0177.pdb |
| SEQ ID NO: 3887 | HHH_rd1_0659.pdb |
| SEQ ID NO: 3888 | HHH_rd2_0105.pdb |
| SEQ ID NO: 3889 | EHEE_rd4_0832.pdb |
| SEQ ID NO: 3890 | EHEE_rd4_0522.pdb |
| SEQ ID NO: 3891 | EHEE_rd2_1162.pdb |
| SEQ ID NO: 3892 | EHEE_rd4_0983.pdb |
| SEQ ID NO: 3893 | EEHEE_rd3_1305.pdb |
| SEQ ID NO: 3894 | EEHEE_rd3_1524.pdb |
| SEQ ID NO: 3895 | EHEE_rd4_0733.pdb |
| SEQ ID NO: 3896 | EEHEE_rd4_0933.pdb |
| SEQ ID NO: 3897 | EEHEE_rd2_0030.pdb |
| SEQ ID NO: 3898 | HEEH_rd1_0644.pdb |
| SEQ ID NO: 3899 | EEHEE_rd3_1173.pdb |
| SEQ ID NO: 3900 | EHEE_rd4_0565.pdb |
| SEQ ID NO: 3901 | EEHEE_rd3_0877.pdb |
| SEQ ID NO: 3902 | EEHEE_rd3_1593.pdb |
| SEQ ID NO: 3903 | EHEE_rd4_0846.pdb |
| SEQ ID NO: 3904 | HEEH_rd3_1395.pdb |
| SEQ ID NO: 3905 | EEHEE_rd3_1312.pdb |
| SEQ ID NO: 3906 | EEHEE_rd3_1020.pdb |
| SEQ ID NO: 3907 | EEHEE_rd3_0974.pdb |
| SEQ ID NO: 3908 | EEHEE_rd4_0651.pdb |
| SEQ ID NO: 3909 | EEHEE_rd3_0698.pdb |
| SEQ ID NO: 3910 | EEHEE_rd4_0952.pdb |
| SEQ ID NO: 3911 | HEEH_rd2_0344.pdb |
| SEQ ID NO: 3912 | EEHEE_rd3_0999.pdb |
| SEQ ID NO: 3913 | HEEH_rd3_1732.pdb |
| SEQ ID NO: 3914 | EEHEE_rd3_1624.pdb |
| SEQ ID NO: 3915 | HHH_rd1_0091.pdb |
| SEQ ID NO: 3916 | EEHEE_rd4_0253.pdb |
| SEQ ID NO: 3917 | HHH_rd2_0008.pdb |
| SEQ ID NO: 3918 | EHEE_rd1_0195.pdb |
| SEQ ID NO: 3919 | HEEH_rd4_0556.pdb |
| SEQ ID NO: 3920 | HHH_rd1_0180.pdb |
| SEQ ID NO: 3921 | HHH_rd1_0825.pdb |
| SEQ ID NO: 3922 | EEHEE_rd4_0692.pdb |
| SEQ ID NO: 3923 | EEHEE_rd4_0166.pdb |
| SEQ ID NO: 3924 | EHEE_rd3_0221.pdb |
| SEQ ID NO: 3925 | HHH_rd1_0649.pdb |
| SEQ ID NO: 3926 | EEHEE_rd2_0607.pdb |
| SEQ ID NO: 3927 | HEEH_rd3_0042.pdb |
| SEQ ID NO: 3928 | EEHEE_rd4_0606.pdb |
| SEQ ID NO: 3929 | HEEH_rd1_0964.pdb |
| SEQ ID NO: 3930 | EEHEE_rd3_1811.pdb |
| SEQ ID NO: 3931 | EHEE_rd4_0364.pdb |
| SEQ ID NO: 3932 | EEHEE_rd3_0323.pdb |
| SEQ ID NO: 3933 | EEHEE_rd3_0307.pdb |
| SEQ ID NO: 3934 | EEHEE_rd3_1699.pdb |
| SEQ ID NO: 3935 | HHH_rd1_0081.pdb |
| SEQ ID NO: 3936 | EHEE_rd4_0128.pdb |
| SEQ ID NO: 3937 | HEEH_rd1_0782.pdb |
| SEQ ID NO: 3938 | EEHEE_rd4_0812.pdb |
| SEQ ID NO: 3939 | EHEE_rd2_0275.pdb |
| SEQ ID NO: 3940 | EEHEE_rd3_0377.pdb |
| SEQ ID NO: 3941 | EEHEE_rd4_0234.pdb |
| SEQ ID NO: 3942 | EHEE_rd1_0475.pdb |
| SEQ ID NO: 3943 | EHEE_rd4_0399.pdb |
| SEQ ID NO: 3944 | EEHEE_rd4_0637.pdb |
| SEQ ID NO: 3945 | HEEH_rd3_1172.pdb |
| SEQ ID NO: 3946 | EHEE_rd4_0108.pdb |
| SEQ ID NO: 3947 | EEHEE_rd3_0647.pdb |
| SEQ ID NO: 3948 | HHH_rd3_0229.pdb |
| SEQ ID NO: 3949 | EEHEE_rd3_1567.pdb |
| SEQ ID NO: 3950 | HHH_rd1_0437.pdb |
| SEQ ID NO: 3951 | HEEH_rd3_0704.pdb |
| SEQ ID NO: 3952 | EHEE_rd4_0997.pdb |
| SEQ ID NO: 3953 | EEHEE_rd3_0410.pdb |
| SEQ ID NO: 3954 | EEHEE_rd3_1529.pdb |
| SEQ ID NO: 3955 | EHEE_rd4_0197.pdb |
| SEQ ID NO: 3956 | EHEE_rd4_0219.pdb |
| SEQ ID NO: 3957 | HEEH_rd2_0852.pdb |
| SEQ ID NO: 3958 | HEEH_rd1_0625.pdb |
| SEQ ID NO: 3959 | EHEE_rd1_0381.pdb |
| SEQ ID NO: 3960 | EHEE_rd4_0582.pdb |
| SEQ ID NO: 3961 | EEHEE_rd3_1463.pdb |
| SEQ ID NO: 3962 | EEHEE_rd3_1159.pdb |
| SEQ ID NO: 3963 | HEEH_rd2_0478.pdb |
| SEQ ID NO: 3964 | EHEE_rd4_0776.pdb |
| SEQ ID NO: 3965 | HEEH_rd3_1456.pdb |
| SEQ ID NO: 3966 | EHEE_rd2_0864.pdb |
| SEQ ID NO: 3967 | EEHEE_rd3_1166.pdb |
| SEQ ID NO: 3968 | EEHEE_rd4_0828.pdb |
| SEQ ID NO: 3969 | HEEH_rd4_0056.pdb |
| SEQ ID NO: 3970 | EHEE_rd2_0196.pdb |
| SEQ ID NO: 3971 | HEEH_rd4_0491.pdb |
| SEQ ID NO: 3972 | EHEE_rd4_0212.pdb |
| SEQ ID NO: 3973 | HEEH_rd4_0294.pdb |
| SEQ ID NO: 3974 | HEEH_rd4_0814.pdb |
| SEQ ID NO: 3975 | EEHEE_rd2_0900.pdb |
| SEQ ID NO: 3976 | EEHEE_rd3_0306.pdb |
| SEQ ID NO: 3977 | EEHEE_rd4_0401.pdb |
| SEQ ID NO: 3978 | HEEH_rd3_1651.pdb |
| SEQ ID NO: 3979 | EEHEE_rd4_0656.pdb |
| SEQ ID NO: 3980 | EEHEE_rd3_0015.pdb |
| SEQ ID NO: 3981 | EEHEE_rd3_1204.pdb |
| SEQ ID NO: 3982 | HEEH_rd4_0664.pdb |
| SEQ ID NO: 3983 | EEHEE_rd3_0275.pdb |
| SEQ ID NO: 3984 | HEEH_rd3_1309.pdb |
| SEQ ID NO: 3985 | EHEE_rd3_0160.pdb |
| SEQ ID NO: 3986 | EEHEE_rd4_0867.pdb |
| SEQ ID NO: 3987 | EEHEE_rd4_0757.pdb |
| SEQ ID NO: 3988 | EHEE_rd4_0519.pdb |
| SEQ ID NO: 3989 | EHEE_rd4_0334.pdb |
| SEQ ID NO: 3990 | EEHEE_rd4_0767.pdb |
| SEQ ID NO: 3991 | EEHEE_rd4_0575.pdb |
| SEQ ID NO: 3992 | HHH_rd4_0983.pdb |
| SEQ ID NO: 3993 | HEEH_rd3_1155.pdb |
| SEQ ID NO: 3994 | HHH_rd4_0961.pdb |
| SEQ ID NO: 3995 | HHH_rd1_0717.pdb |
| SEQ ID NO: 3996 | EEHEE_rd4_0245.pdb |
| SEQ ID NO: 3997 | HHH_rd3_0153.pdb |
| SEQ ID NO: 3998 | EHEE_rd3_0080.pdb |
| SEQ ID NO: 3999 | EHEE_rd4_0400.pdb |
| SEQ ID NO: 4000 | EEHEE_rd3_0638.pdb |

### REFERENCES

[0110] 1. K. A. Dill, Dominant forces in protein folding. Biochemistry. 29, 7133-7155 (1990).
[0111] 2. A. D. Robertson, K. P. Murphy, Protein Structure and the Energetics of Protein Stability. Chem. Rev. 97, 1251-1268 (1997).
[0112] 3. C. Nick Pace, J. Martin Scholtz, G. R. Grimsley, Forces stabilizing proteins. FEBS Lett. 588, 2177-2184 (2014).
[0113] 4. H. Gelman, M. Gruebele, Fast protein folding kinetics. Q. Rev. Biophys. 47, 95-142 (2014).
[0114] 5. X. Jiang, J. Kowalski, J. W. Kelly, Increasing protein stability using a rational approach combining sequence homology and structural alignment: Stabilizing the WW domain. Protein Sci. 10, 1454-1465 (2001).
[0115] 6. M. Jager et al., Structure-function-folding relationship in a WW domain. Proceedings of the National Academy of Sciences. 103, 10648-10653 (2006).
[0116] 7. S. Xiao, Y. Bi, B. Shan, D. P. Raleigh, Analysis of core packing in a cooperatively folded miniature protein: the ultrafast folding villin headpiece helical subdomain. Biochemistry. 48, 4607-4616 (2009).
[0117] 8. H. Neuweiler et al., The folding mechanism of BBL: Plasticity of transition-state structure observed within an ultrafast folding protein family. J. Mol. Biol. 390, 1060-1073 (2009).
[0118] 9. C. N. Pace et al., Contribution of hydrophobic interactions to protein stability. J. Mol. Bol. 408, 514-528 (2011).
[0119] 10. C. L. Araya et al., A fundamental protein property, thermodynamic stability, revealed solely from large-scale measurements of protein function. Proc. Natl. Acad. Sci. U.S.A. 109, 16858-16863 (2012).
[0120] 11. S. Xiao et al., Rational modification of protein stability by targeting surface sites leads to complicated results. Proc. Natl. Acad. Sci. U.S.A. 110, 11337-11342 (2013).
[0121] 12. C. N. Pace et al., Contribution of hydrogen bonds to protein stability. Protein Sci. 23, 652-661 (2014).
[0122] 13. K. Lindorff-Larsen, S. Piana, R. O. Dror, D. E. Shaw, How Fast-Folding Proteins Fold. Science. 334, 517-520 (2011).
[0123] 14. S. Piana, K. Lindorff-Larsen, D. E. Shaw, Protein folding kinetics and thermodynamics from atomistic simulation. Proc. Natl. Acad. Sci. U.S.A. 109, 17845-17850 (2012).
[0124] 15. H. Nguyen, J. Maier, H. Huang, V. Perrone, C. Simmerling, Folding simulations for proteins with diverse topologies are accessible in days with a physics-based force field and implicit solvent. J. Am. Chem. Soc. 136, 13959-13962 (2014).
[0125] 16. P.-S. Huang, S. E. Boyken, D. Baker, The coming of age of de novo protein design. Nature. 537, 320-327 (2016).
[0126] 17. C. A. Rohl, C. E. M. Strauss, K. M. S. Misura, D. Baker, Protein structure prediction using Rosetta. Methods Enzymol. 383, 66-93 (2004).
[0127] 18. T. J. Magliery, Protein stability: computation, sequence statistics, and new experimental methods. Curr. Opin. Struct. Biol. 33, 161-168 (2015).
[0128] 19. H. Park et al., Simultaneous Optimization of Biomolecular Energy Functions on Features from Small Molecules and Macromolecules. J. Chem. Theory Comput. 12, 6201-6212 (2016).
[0129] 20. B. 1. Dahiyat, S. L. Mayo, De novo protein design: fully automated sequence selection. Science. 278, 82-87 (1997).
[0130] 21. H. Liang et al., De Novo Design of a βαβ Motif. Angew. Chem. Int. Ed. 48, 3301-3303 (2009).
[0131] 22. S. Kosuri, G. M. Church, Large-scale de novo DNA synthesis: technologies and applications. Nat. Methods. 11, 499-507 (2014).
[0132] 23. E. T. Boder, K. D. Wittrup, Yeast surface display for screening combinatorial polypeptide libraries. Nat. Biotechnol, 15, 553-557 (1997).
[0133] 24. C. Park, S. Marqusee, Pulse proteolysis: a simple method for quantitative determination of protein stability and ligand binding. Nat. Methods. 2, 207-212 (2005).
[0134] 25. C. Park, S. Zhou, J. Gilmore, S. Marqusee, Energetics-based protein profiling on a proteomic scale: identification of proteins resistant to proteolysis. J. Mol. Biol. 368, 1426-1437 (2007).
[0135] 26. V. Sieber, A. Plückthun, F. X. Schmid, Selecting proteins with improved stability by a phage-based method. Nat. Biotechnol. 16, 955-960 (1998).
[0136] 27. M. D. Finucane, M. Tuna, J. H. Lees, D. N. Woolfson, Core-directed protein design. I. An experimental method for selecting stable proteins from combinatorial libraries. Biochemistry. 38, 11604-11612 (1999).
[0137] 28. M. Jager, M. Dendle, J. W. Kelly, Sequence determinants of thermodynamic stability in a WW domain—an all-beta-sheet protein. Protein Sci. 18, 1806-1813 (2009).
[0138] 29. G. Bhardwaj et al., Accurate de novo design of hyperstable constrained peptides. Nature. 538, 329-335 (2016).
[0139] 30. N. Koga et al., Principles for designing ideal protein structures. Nature. 491, 222-227 (2012).
[0140] 31. S. Kamtekar, J. Schiffer, H. Xiong, J. Babik, M. Hecht, Protein design by binary patterning of polar and nonpolar amino acids. Science. 262, 1680-1685 (1993).
[0141] 32. A. R. Davidson, R. T. Sauer, Folded proteins occur frequently in libraries of random amino acid sequences. Proc. Natl. Acad. Sci. U.S.A. 91, 2146-2150 (1994).
[0142] 33. M. H. Hecht, A. Das, A. Go, L. H. Bradley, Y. Wei, De novo proteins from designed combinatorial libraries. Protein Sci. 13, 1711-1723 (2004).
[0143] 34. M. D. S. Kumar et al., ProTherm and ProNIT: thermodynamic databases for proteins and protein-nucleic acid interactions. Nucleic Acids Res. 34, D204-6 (2006).
[0144] 35. E. G. Baker et al., Local and macroscopic electrostatic interactions in single α-helices.

[0145] Nat. Chem. Biol. 11, 221-228 (2015).
[0146] 36. D. S. Doering, P. Matsudaira, Cysteine scanning mutagenesis at 40 of 76 positions in villin headpiece maps the F-actin binding site and structural features of the domain.

[0147] Biochemistry. 35, 12677-12685 (1996).
[0148] 37. J. Meng et al., High-resolution crystal structures of villin headpiece and mutants with reduced F-actin binding activity. Biochemistry. 44, 11963-11973 (2005).
[0149] 38. M. A. Verdecia, M. E. Bowman, K. P. Lu, T. Hunter, J. P. Noel. Structural basis for phosphoserine-proline recognition by group IV WW domains. Nat. Struct. Biol. 7, 639-643 (2000).
[0150] 39. B. K. Shoichet, W. A. Baase, R. Kuroki, B. W. Matthews, A relationship between protein stability and protein function. Proceedings of the National Academy of Sciences. 92, 452-456 (1995).
[0151] 40. P. A. Chong, H. Lin. J. L. Wrana, J. D. Forman-Kay, An expanded WW domain recognition motif revealed by the interaction between Smad7 and the E3 ubiquitin ligase Smurf2. J. Biol. Chem. 281, 17069-17075 (2006).
[0152] 41. E. Aragón et al., Structural basis for the versatile interactions of Smad7 with regulator WW domains in TGF-β Pathways. Structure. 20, 1726-1736 (2012).
[0153] 42. S. Piana, J. L. Klepeis, D. E. Shaw, Assessing the accuracy of physical models used in protein-folding simulations: quantitative evidence from long molecular dynamics simulations. Curr. Opin. Struct. Biol. 24, 98-105 (2014).
[0154] 43. J. S. Appelbaum et al., Arginine topology controls escape of minimally cationic proteins from early endosomes to the cytoplasm. Chem. Biol. 19, 819-830 (2012).
[0155] 44. J. R. LaRochelle, G. B. Cobb, A. Steinauer, E. Rhoades, A. Schepartz, Fluorescence correlation spectroscopy reveals highly efficient cytosolic delivery of certain penta-arg proteins and stapled peptides. J. Am. Chem. Soc. 137, 2536-2541 (2015).
[0156] 45. P.-S. Huang et al., RosettaRemodel: a generalized framework for flexible backbone protein design. PLoS One. 6, e24109 (2011).
[0157] 46. A. Leaver-Fay et al., in Methods in Enzymology (2013), pp. 109-143.
[0158] 47. R. F. Alford et al., The Rosetta all-atom energy function for macromolecular modeling and design (2017), doi:10.1101/106054.
[0159] 48. F. Pedregosa et al., Scikit-learn: Machine Learning in Python. J. Mach. Learn. Res. 12, 2825-2830 (2011).
[0160] 49. D. M. Hoover, J. Lubkowski, DNAWorks: an automated method for designing oligonucleotides for PCR-based gene synthesis. Nucleic Acids Res. 30, e43 (2002).
[0161] 50. L. Benatuil, J. M. Perez, J. Belk, C.-M. Ilsieh, An improved yeast transformation method for the generation of very large human antibody libraries. Protein Eng. Des. Sel. 23, 155-159 (2010).
[0162] 51. G. Chao et al., Isolating and engineering human antibodies using yeast surface display. Nat. Protoc. 1, 755-768 (2006).
[0163] 52. J. Zhang, K. Kobert, T. Flouri, A. Stamatakis, PEAR: a fast and accurate Illumina Paired-End reAd mergeR. Bioinformatics. 30, 614-620 (2014).
[0164] 53. A. Patil, D. Huard, C. J. Fonnesbeck, PyMC: Bayesian Stochastic Modelling in Python. J. Stat. Softw. 35, 1-81 (2010).
[0165] 54. The Theano Development Team et al., Theano: A Python framework for fast computation of mathematical expressions. arXiv [cs.SC] (2016), (available at http://arxiv.org/abs/1605.02688).
[0166] 55. D. G. Gibson et al., Enzymatic assembly of DNA molecules up to several hundred kilobases. Nat. Methods. 6, 343-345 (2009),
[0167] 56. F. W. Studier, Protein production by auto-induction in high density shaking cultures. Protein Expr. Purif 41, 207-234 (2005).
[0168] 57. C. N. Pace, F. Vajdos, L. Fee, G. Grimsley, T. Gray, How to measure and predict the molar absorption coefficient of a protein. Protein Sci. 4, 2411-2423 (1995).
[0169] 58. M. M. Santoro, D. W. Bolen, Unfolding free energy changes determined by the linear extrapolation method. 1. Unfolding of phenylmethanesulfonyl alpha-chymotrypsin using different denaturants. Biochemistry. 27, 8063-8068 (1988).
[0170] 59. V. Y. Orekhov, I. Ibraghimov, M. Billeter, Optimizing resolution in multidimensional NMR by three-way decomposition. J. Biomol. NMR. 27, 165-173 (2003).
[0171] 60. K. Kazimierczuk, V. Y. Orekhov, Accelerated NMR spectroscopy by using compressed sensing. Angew. Chem. Int. Ed Engl. 50, 5556-5559 (2011).
[0172] 61. F. Delaglio et al., NMRPipe: a multidimensional spectral processing system based on UNIX pipes. J. Biomol. NMR. 6, 277-293 (1995).
[0173] 62. A. Lemak et al., A novel strategy for NMR resonance assignment and protein structure determination. J. Biomol. NMR. 49, 27-38 (2011).
[0174] 63. A. Lemak, C. A. Steren, C. H. Arrowsmith, M. Llinás, Sequence specific resonance assignment via Multicanonical Monte Carlo search using an ABACUS approach. J. Biomol. NMR. 41, 29-41 (2008).
[0175] 64. P. Güntert, Automated NMR structure calculation with CYANA. Methods Mol. Biol. 278, 353-378 (2004).
[0176] 65. A. T. Branger et al., Crystallography & NMR system: A new software suite for macromolecular structure determination. Acta Crystallogr. D Bio. Crystalogr. 54, 905-921 (1998).
[0177] 66. J. P. Linge, M. A. Williams, C. A. E. M. Spronk, Alexandre M J, M. Nilges, Refinement of protein structures in explicit solvent. Proteins: Struct. Funct. Bioinf 50, 496-506 (2003).
[0178] 67. D. T. Jones, Protein secondary structure prediction based on position-specific scoring matrices. J. Mol. Biol. 292, 195-202 (1999).
[0179] 68. M. Remmert, A. Biegert, A. Hauser, J. SBding, HHblits: lightning-fast iterative protein sequence searching by HMM-HMM alignment. Nat. Methods. 9, 173-175 (2011).
[0180] 69. V. Alva, S.-Z. Nam, J. Soding, A. N. Lupas, The MPI bioinformatics Toolkit as an integrative platform for advanced protein sequence and structure analysis. Nucleic Acids Res. 44, W410-W415 (2016).
[0181] 70. G. E. Crooks, WebLogo: A Sequence Logo Generator. Genome Res. 14, 1188-1190 (2004).
[0182] 71. Y. Pan et al., Quantitative proteomics reveals the kinetics of trypsin-catalyzed protein digestion. Anal. Bioanal. Chem. 406, 6247-6256 (2014).
[0183] 72. V. Schellenberger, K. Braune, H. J. Hofmann, H. D. Jakubke, The specificity of chymotrypsin. A statistical analysis of hydrolysis data. Eur. J. Biochem. 199, 623-636 (1991).
[0184] 73. V. Schellenberger, C. W. Turck, L. Hedstrom. W. J. Rutter, Mapping the S′ subsites of serine proteases using acyl transfer to mixtures of peptide nucleophiles. Biochemistry. 32, 4349-4353 (1993).
[0185] 74. V. Schellenberger, C. W. Turck, W. J. Rutter, Role of the S′ Subsites in Serine Protease Catalysis. Active-Site Mapping of Rat Chymotrypsin, Rat Trypsin, .alpha.-Lytic Protease, and Cercarial Protease from Schistosoma mansoni. Biochemistry. 33, 4251-4257 (1994).
[0186] 75. R. A. Laskowski, M. W. MacArthur, D. S. Moss, J. M. Thornton, PROCHECK: a program to check the stereochemical quality of protein structures. J. Appl. Crystallogr. 26, 283-291 (1993).
[0187] 76. A. Bhattacharya, R. Tejero, G. T. Montelione, Evaluating protein structures determined by structural genomics consortia. Proteins. 66, 778-795 (2007).
[0188] 77. W. Kabsch, C. Sander, Dictionary of protein secondary structure: Pattern recognition of hydrogen-bonded and geometrical features. Biopolymers. 22, 2577-2637 (1983).
[0189] 78. Y.-R. Lin et al., Control over overall shape and size in de novo designed proteins. Proc. Natl. Acad. Sci. U.S.A. 112, E5478-85 (2015).
[0190] 79. O. D. Monera, T. J. Sereda, N. E. Zhou, C. M. Kay, R. S. Hodges, Relationship of sidechain hydrophobicity and α-helical propensity on the stability of the single-stranded amphipathic α-helix J. Pept. Sci. 1, 319-329 (1995).
[0191] 80. F. Zheng, J. Zhang, G. Grigoryan, Tertiary structural propensities reveal fundamental sequence/structure relationships. Structure. 23, 961-971 (2015).

The application's sequence listing, which the Patent Office published only in electronic form, follows.

SEQUENCE LISTING (4000 sequences)

SEQ ID NO: 1 - protein, 43 aa, Artificial Sequence
  Synthetic
DSEQLKEEAKKAYKNGNEEKAKRILKKAGLDESEAEEFLRRAF

SEQ ID NO: 2 - protein, 43 aa, Artificial Sequence
  Synthetic
TTIHVGDLTLKYDNPKKAYEIAKKLAKKYNLTVTIKNGKITVT

SEQ ID NO: 3 - protein, 40 aa, Artificial Sequence
  Synthetic
SVTYEVDGEEKARRIWKMLAARNLDVKIEIRNGKFILTAS

SEQ ID NO: 4 - protein, 43 aa, Artificial Sequence
  Synthetic
DDEARRRAKKLLEKGYSEDYIREYLKRQGVNPDEAEDAIRWAK

SEQ ID NO: 5 - protein, 43 aa, Artificial Sequence
  Synthetic
GTVKVQGITIKVPNPDKAYKIAKKLAKKYNLTVTRKGNTIKVE

SEQ ID NO: 6 - protein, 43 aa, Artificial Sequence
  Synthetic
SDKAREIARELWERGVSPEEIREILEKLGVDSEEAERLAREVK

SEQ ID NO: 7 - protein, 43 aa, Artificial Sequence
  Synthetic
EEEVKKRIRELAKRGVSPEQIREWLRKQGYSPDQAKQLFEEAM

SEQ ID NO: 8 - protein, 43 aa, Artificial Sequence
  Synthetic
KEEAEKIVRELLRRGVSDEEIEDILKKAGLSDEDVKRLIRRVK

SEQ ID NO: 9 - protein, 43 aa, Artificial Sequence
  Synthetic
SEDARRWAEEAWKRGVNEEEIERWLREQGVSEEEARRILKAAR

SEQ ID NO: 10 - protein, 43 aa, Artificial Sequence
  Synthetic
DEEQKKQVRKLLRSGVDDEQVVKYLKRQGVSEEEARRIVRKAK

SEQ ID NO: 11 - protein, 43 aa, Artificial Sequence [sequence omitted]

SEQ ID NO: 12 - protein, 43 aa, Artificial Sequence
  Synthetic
DEEVERIVKRLYRNGVSPEQIREYLKRRGVDPREVDRAIRKAI

SEQ ID NO: 13 - protein, 43 aa, Artificial Sequence
  Synthetic
PEELEKQARRLKRNGVSEEQIERILRRQGVSDEILEEIKRRLR

SEQ ID NO: 14 - protein, 43 aa, Artificial Sequence
  Synthetic
TEKVKKIAKKLAEKGYSEDDIEEILRRLGVTEEEIKRALKWLR

SEQ ID NO: 15 - protein, 43 aa, Artificial Sequence
  Synthetic
DEAVKRVLREARENNLSDEQVERLARRLGVDPELIKEIRRKLK

SEQ ID NO: 16 - protein, 43 aa, Artificial Sequence
  Synthetic
TEEIEKIVEKLLRNGVSDEQVERYLRRQGVSEEEIKEVIRKVK

SEQ ID NO: 17 - protein, 40 aa, Artificial Sequence
  Synthetic
TTQIEVDDEEQAKKLAKKWQKKGYDAHYTQKNGKWFVQFN

SEQ ID NO: 18 - protein, 43 aa, Artificial Sequence
  Synthetic
DEEIERIVRKLLKEGVSDEEVKEYLKRRGVDPDKVEKVIRKVK

SEQ ID NO: 19 - protein, 43 aa, Artificial Sequence
  Synthetic
SDEARKIAEELKRRGYSPEQIIRYLKKQGYSEEEAERAIREVG

SEQ ID NO: 20 - protein, 43 aa, Artificial Sequence
  Synthetic
PEEAERQARKLAKQGVSEEEIEKLLRRYGVSDEEIKRILRRVM

SEQ ID NO: 21 - protein, 43 aa, Artificial Sequence
  Synthetic
SDEAVKIWRRLRKQGVDPDQVKKILKRLGISDEEIKEVEKLVS

SEQ ID NO: 22 - protein, 43 aa, Artificial Sequence
  Synthetic
PEEDLRRKVEELLRRGNEDEARKVAKKAGISEEEWKELKKRAN

SEQ ID NO: 23 - protein, 43 aa, Artificial Sequence
  Synthetic
STEEAEKRAEKALKDGNEDKAKELLQRAGYSPDEAEEIVRRLL

SEQ ID NO: 24 - protein, 43 aa, Artificial Sequence
  Synthetic
SSEELEERAKEAVKRGNEDKARELLRKAGYNPDEADEIVERIK

SEQ ID NO: 25 - protein, 43 aa, Artificial Sequence
  Synthetic
DEEVEKVVREAYKRGLSPEQVEKLLRRLGVDPDEVKKAIDRVF

SEQ ID NO: 26 - protein, 43 aa, Artificial Sequence
  Synthetic
QKDEELAKELLKKANGDLEKARELARRQGISEKTVEEVWRRLL

SEQ ID NO: 27 - protein, 43 aa, Artificial Sequence [sequence omitted]

SEQ ID NO: 28 - protein, 43 aa, Artificial Sequence
  Synthetic
ERRKIEEIAKKLYQSGNPEAARRFLRKAGISEEEIERILQKAG

SEQ ID NO: 29 - protein, 43 aa, Artificial Sequence
  Synthetic
PEEVEKIYRKLRRSGVSEEQVEKILKRQGVDPREIEEVKRKVN

SEQ ID NO: 30 - protein, 43 aa, Artificial Sequence
  Synthetic
PEDEKKAKEALKRANGDEDKAKEILRKLGVDPDRAEELLRRLR

SEQ ID NO: 31 - protein, 43 aa, Artificial Sequence
  Synthetic
TTVHVNGVEYRFNNPEEAYKFAVRMAKEIGGTVEFHGEEIHVE

SEQ ID NO: 32 - protein, 43 aa, Artificial Sequence
  Synthetic
EERVEKLVRELYRRGVSPDQIREILKRNGVDDKAVEDALRRVS

SEQ ID NO: 33 - protein, 43 aa, Artificial Sequence
  Synthetic
SEEVEKIVKELLENGVSDEEIKEYLRRRGVDPKEVEEVIKKVK

SEQ ID NO: 34 - protein, 40 aa, Artificial Sequence
  Synthetic
RITFHMNGPEQAKRLIKWAKKQNLRFQVRQENGQIIIDID

SEQ ID NO: 35 - protein, 40 aa, Artificial Sequence
  Synthetic
TTRYRFTDEEEARRAAKEWARRGYQVHVTQNGTYWEVEVR

SEQ ID NO: 36 - protein, 43 aa, Artificial Sequence
  Synthetic
TEEVEKIVERLVRNGVNEEQIRRILRRQNVSEEDVERAIRKAL

SEQ ID NO: 37 - protein, 43 aa, Artificial Sequence
  Synthetic
DEKVEKIVRELYRRGVSDEQIKKILRRQGVDPREVEEAVRRVV

SEQ ID NO: 38 - protein, 43 aa, Artificial Sequence
  Synthetic
PEEEIQREIDKAVRNKDWKRVVELLKRQGVSEEEAKKIAKRLA

SEQ ID NO: 39 - protein, 43 aa, Artificial Sequence
  Synthetic
DEEVEKIVRRLYRNGISEEQIRKILKRRGVSDEEVDRAVRRVV

SEQ ID NO: 40 - protein, 43 aa, Artificial Sequence
  Synthetic
TEKQERAIEYIRRLGYSEEEARRILKKANGNPDLAKEIARRIG

SEQ ID NO: 41 - protein, 40 aa, Artificial Sequence
  Synthetic
QFTVTIEGDEAMKKFIKEMKKRNLEVHVRVENGQWIAHVS

SEQ ID NO: 42 - protein, 43 aa, Artificial Sequence
  Synthetic
TDDARKIYKKLKNKGLNPDEISEILKRLGVSEDEIRQIEKEER

SEQ ID NO: 43 - protein, 43 aa, Artificial Sequence
  Synthetic
DDELVKHVRRLLRQGVSEEQVRRELRRRGVDPKEVEEVIRKAK

SEQ ID NO: 44 - protein, 43 aa, Artificial Sequence
  Synthetic
DEDAEKIARELKRRGISPDEIKEILKRLGVDPRIVEEIVKKLK

SEQ ID NO: 45 - protein, 43 aa, Artificial Sequence [sequence omitted]

SEQ ID NO: 46 - protein, 43 aa, Artificial Sequence
  Synthetic
DEEVEKVIRRFQRGELSEEQLRRILQRLGVSDEEVDKIVRRVS

SEQ ID NO: 47 - protein, 43 aa, Artificial Sequence
  Synthetic
DEEAEKRVRDLARKGVDEDQIRKILKRLGVSDEEIDEILKRLR

SEQ ID NO: 48 - protein, 43 aa, Artificial Sequence
  Synthetic
QPKELEKEAERAAREGDKETARELLERAGYTTDEAEELIRRIM

SEQ ID NO: 49 - protein, 43 aa, Artificial Sequence
  Synthetic
RKEEAKKRAEKAVRNGNEDKAREILRRAGFSDDEIEEILRKLR

SEQ ID NO: 50 - protein, 43 aa, Artificial Sequence
  Synthetic
TEEVERIVRELARRGFSKEQITKILRKRGVSDEEVERVLRKVW

SEQ ID NO: 51 - protein, 43 aa, Artificial Sequence
  Synthetic
TTVHINGVQYDFDNPEEAYKFAVRMARELGLRLEIHNGKFHVE

SEQ ID NO: 52 - protein, 43 aa, Artificial Sequence
  Synthetic
NEEIRRIVERLYRNGVSPDQIREYLKRQGFDDREVEEVIRKVS

SEQ ID NO: 53 - protein, 43 aa, Artificial Sequence
  Synthetic
QEEVEKIVRRLLKNGVSPEQVKKRVRRAGADPRVIDEVIRKWL

SEQ ID NO: 54 - protein, 43 aa, Artificial Sequence
  Synthetic
DDEVRKQVERLLRNGVSDEQVVRILKRQGVSEEEVKRLVRRLK

SEQ ID NO: 55 - protein, 43 aa, Artificial Sequence
  Synthetic
DERVERIVRRLLRNGVDPEQVVEILKRNGVDEKEVRKVVRRVS

SEQ ID NO: 56 - protein, 43 aa, Artificial Sequence
  Synthetic
LEEYEKRVEELKRRGVSEEEIRKILKRAGLSDEQVDRLLQKLK

SEQ ID NO: 57 - protein, 43 aa, Artificial Sequence
  Synthetic
IEEVEKIVRKLKRDGYSDDQIREILKRNGVDERQVDEVLRKIE

SEQ ID NO: 58 - protein, 43 aa, Artificial Sequence
  Synthetic
HTVHVNGQKYTFPTLEKAAKFAKKLAKKLGLTVEVHGNTIKLE

SEQ ID NO: 59 - protein, 43 aa, Artificial Sequence
  Synthetic
IEEVEKIVRRLLRNGASEEEVKKWLKDQGVDPREVDEVVRRVS

SEQ ID NO: 60 - protein, 43 aa, Artificial Sequence
  Synthetic
PDELTRRAQELLKRGVSPREVEEWIRKNGYSEEEAEKIVRKAL

SEQ ID NO: 61 - protein, 43 aa, Artificial Sequence
  Synthetic
PEEVVRLIRKLRRDGYSEEEIEKIVRRRGYSEDELREAQKLVN

SEQ ID NO: 62 - protein, 43 aa, Artificial Sequence
  Synthetic
EEEVERLVRKLKREGVSDEEIIKILRRRGVDPRIVEKVVKQVS

SEQ ID NO: 63 - protein, 43 aa, Artificial Sequence
  Synthetic
EDEVKRIAEELYKNGASDEQIERALRKNGVSEEKIKRALKYLR

SEQ ID NO: 64 - protein, 43 aa, Artificial Sequence
  Synthetic
DESARQALEKLWRKGVSPEQLKKYAKKLGLSEETAERIIRKIL

SEQ ID NO: 65 - protein, 43 aa, Artificial Sequence
  Synthetic
NEEVEEIVEKLYRKGVDPDQIKKILKRRGVSDEEVKRAIDKAI

SEQ ID NO: 66 - protein, 43 aa, Artificial Sequence
  Synthetic
PEEVEKIVEELLRRGVDPDQIRKILRRQGISEEEIREAERRVR

SEQ ID NO: 67 - protein, 43 aa, Artificial Sequence
  Synthetic
PPEVTKIVRELLRRGVSEEEVRRILRRQGVDERDVQKALKDAS

SEQ ID NO: 68 - protein, 43 aa, Artificial Sequence
  Synthetic
SQEEAERRAEKALRNGNEEKARQILENAGYSTDEADEIIRRIK

SEQ ID NO: 69 - protein, 43 aa, Artificial Sequence
  Synthetic
PEEIEKIVRELKRRGVDDRQIRRILQRQGVDERAIDEVLKRVK

SEQ ID NO: 70 - protein, 43 aa, Artificial Sequence
  Synthetic
DEEVEKQVRELKRRGVSKDEIKEYLQRLGLSDEEVEKILRKVG

SEQ ID NO: 71 - protein, 43 aa, Artificial Sequence
  Synthetic
PDEVVKIIRRLKRNGVDDRQVRELLRRQGIDERQIREAEKIVS

SEQ ID NO: 72 - protein, 43 aa, Artificial Sequence
  Synthetic
QDEIAKIIEELRRRGKDDDEIRKILRKLGISEDEARRAEKKLG

SEQ ID NO: 73 - protein, 40 aa, Artificial Sequence
  Synthetic
TTTYTYDDKQAAKEAAEEWKKRGYEVHLTQKGNKWQVKVG

SEQ ID NO: 74 - protein, 43 aa, Artificial Sequence
  Synthetic
DEEAKKLVRKLIRNGVSDEQLERALKRLGFSPEQVKKIVRDVK

SEQ ID NO: 75 - protein, 43 aa, Artificial Sequence
  Synthetic
DERAERVVRRLKRNNVDEDQIRKILKRLGLSDEEVDRVIKKVK

SEQ ID NO: 76 - protein, 43 aa, Artificial Sequence
  Synthetic
KTVHVNGVQYHFSNPEEAEKFARRMAKELNLQLRLEGDTWHVE

SEQ ID NO: 77 - protein, 43 aa, Artificial Sequence
  Synthetic
QPEEWKELAKEALKNGNEDLARELLKRAGLSPEQADRFIRKAL

SEQ ID NO: 78 - protein, 43 aa, Artificial Sequence
  Synthetic
SQEELKRKAKEALKRGDEEKARRLLKKAGASPEQIEKFIQKVG

SEQ ID NO: 79 - protein, 43 aa, Artificial Sequence
  Synthetic
PEELEKVFRKLKRDGVSPEEIKDILKKQGVSDEQIERIKRRVD

SEQ ID NO: 80 - protein, 43 aa, Artificial Sequence
  Synthetic
KEEIKRLFEEALKNGLSVEQALRYARKLGASQDLLEELKKIAN

SEQ ID NO: 81 - protein, 43 aa, Artificial Sequence
  Synthetic
TQDELIKRAWKALQKGDKDTAEELARRAGYTLDQVEEIYNRLG

SEQ ID NO: 82 - protein, 43 aa, Artificial Sequence
  Synthetic
QPEAEKLARELRKRGFSPDQVREILKRLGVSPDEAQKILDRVF

SEQ ID NO: 83 - protein, 43 aa, Artificial Sequence
  Synthetic
DEEIEKQVEELLRRGVSDEEIVEYLKRQGIDEDKVREIVRKVK

SEQ ID NO: 84 - protein, 43 aa, Artificial Sequence
  Synthetic
TEEDKKIKKIAKEVGVSEELVRRVLRRANGDEEDVKRILRELK

SEQ ID NO: 85 - protein, 43 aa, Artificial Sequence
  Synthetic
PEDLEKEVHKLLQRGVDDREVKEWLKRQGVDPREVEEIIRKVK

SEQ ID NO: 86 - protein, 43 aa, Artificial Sequence
  Synthetic
DERLERIWRRLERNGVSDEEIEEYLKRKGVDDRQIEEVKRRVK

SEQ ID NO: 87 - protein, 43 aa, Artificial Sequence
  Synthetic
DERVERIVERLIREGVSDEEIKKYLKRQGVDEEQVERVIRKVR

SEQ ID NO: 88 - protein, 43 aa, Artificial Sequence
  Synthetic
MEEYQKQVHRLLRQGVSEDEVTKYLQRQGVSDEQVKKLIRRAK

SEQ ID NO: 89 - protein, 43 aa, Artificial Sequence
  Synthetic
AEVHVGNVTYKFDNPEEAKKFAKRLAKELNLTIEFRGETIHVQ

SEQ ID NO: 90 - protein, 43 aa, Artificial Sequence
  Synthetic
TQEELKEAAKEALKEGDEDKARELLQRAGVDPSQAEEFIQRFK

SEQ ID NO: 91 - protein, 43 aa, Artificial Sequence
  Synthetic
SEKEKTVRKLAKELNVDPEVVRKLLDEANGDEERVRELVRRKY

SEQ ID NO: 92 - protein, 43 aa, Artificial Sequence
  Synthetic
PEEIRRIIRELKRRGVSDEQVVQIVKKRGADEDEVREIIKRLK

SEQ ID NO: 93 - protein, 43 aa, Artificial Sequence
  Synthetic
VTVTIQGMNYTFSSPEQAYRFAVEMARKLGLRIEFHGNTIRVE

SEQ ID NO: 94 - protein, 40 aa, Artificial Sequence
  Synthetic
TTTITVDDKEEAKKVAEEWLRRGYTVTIRQENGKWHVEVR

SEQ ID NO: 95 - protein, 43 aa, Artificial Sequence
  Synthetic
VQVHIGNVTYHFDNPEEAYKFAVKMARKLNLRIEFHGNQIHVE

SEQ ID NO: 96 - protein, 43 aa, Artificial Sequence
  Synthetic
SEEVERIVRKLLRNGVSPEEVRRILERQGVDPREVERAIRKVL

SEQ ID NO: 97 - protein, 43 aa, Artificial Sequence
  Synthetic
DEEVKKHARELYESGLSPEQIARILRRQGVDEKIVQEAVKYAS

SEQ ID NO: 98 - protein, 43 aa, Artificial Sequence
  Synthetic
DERVDRIVKKLYDNGVDERQIREYLKRQGVDDRKVERALRKLR

SEQ ID NO: 99 - protein, 43 aa, Artificial Sequence
  Synthetic
SKDEKLVKKALKRANGNEDKAREIAKELGLDPERFERALQRIR

SEQ ID NO: 100 - protein, 43 aa, Artificial Sequence
  Synthetic
PEEAKKAIEELIRRGASDEEIIRVARRYGISDEQVKDIIRKLR

SEQ ID NO: 101 - protein, 43 aa, Artificial Sequence
  Synthetic
DQEELKRRVEKLVRNGDEDQAKKVLKRVGLSDEQVERVIQRLL

SEQ ID NO: 102 - protein, 43 aa, Artificial Sequence
  Synthetic
EEEVEKIIRELKRRGVDDRQIRKILQKRGISDEQIEKVARKVS

SEQ ID NO: 103 - protein, 43 aa, Artificial Sequence
  Synthetic
TTVKINGETYQFNNPEEAYKWALKIAKKLGLTLEYHGDTITVK

SEQ ID NO: 104 - protein, 43 aa, Artificial Sequence
  Synthetic
TEEDVQEKVKDALRKGDEEKVKDIVRRYNLSPDILRKLRRDVL

SEQ ID NO: 105 - protein, 43 aa, Artificial Sequence
  Synthetic
PEDLKREAEKLWRNGVSKEEIKKWLKKAGASEDEIREIEKELD

SEQ ID NO: 106 - protein, 43 aa, Artificial Sequence
  Synthetic
DEKAEKIVRELLRRGVSEEQVAEILKRAGVSEEIVQDLLRKIS

SEQ ID NO: 107 - protein, 43 aa, Artificial Sequence
  Synthetic
TEEVEKIIERLLRNGVDPEQVKEYLKRQGYDPREIEKALKRVL

SEQ ID NO: 108 - protein, 43 aa, Artificial Sequence
  Synthetic
DTELKRKIEHLLRRGIDPREIVKHLKKQGANPEEVKELIRRIL

SEQ ID NO: 109 - protein, 40 aa, Artificial Sequence
  Synthetic
TSEYTFDDKREAERFREEAERKGYTVTVTRDGTKWRVRIG

SEQ ID NO: 110 - protein, 43 aa, Artificial Sequence
  Synthetic
REDAKEVARQLYENGYSPEQIERILRKLGVSEDEAKEAIRYAL

SEQ ID NO: 111 - protein, 40 aa, Artificial Sequence
  Synthetic
SVTYTFDGEEKARAMLKAARAHNLDVKIKQENGKWIVTIH

SEQ ID NO: 112 - protein, 43 aa, Artificial Sequence
  Synthetic
SEDVEKIIRDLKRRGVSPDQIKEYLKRQGFDEREIEEVLRKVK

SEQ ID NO: 113 - protein, 43 aa, Artificial Sequence
  Synthetic
SEEAEKRARELYKRGVSKEQIKEVLKRLGVDPKEVEEIVRRIK

SEQ ID NO: 114 - protein, 43 aa, Artificial Sequence
  Synthetic
DDEVRKIIEELLRRGVSPDQVKEILRRRGVDEREVEKVLKEIL

SEQ ID NO: 115 - protein, 43 aa, Artificial Sequence
  Synthetic
RPEEWKKLAKELAERGNEDEARKALKKAGLSPDQIEEFLKKYG

SEQ ID NO: 116 - protein, 43 aa, Artificial Sequence
  Synthetic
DDRIREQIEKLKRNGVSDEEIKKRLRKQGIDEDEVRRLIEQVK

SEQ ID NO: 117 - protein, 40 aa, Artificial Sequence
  Synthetic
TEEYEYTDEQQAREAAREWREKGYTVTIEEHNGRWRVKTG

SEQ ID NO: 118 - protein, 43 aa, Artificial Sequence
  Synthetic
DERAKEIVKRLQRKGYSDEQIKRILKRNGYSPEEVDKVVKDVK

SEQ ID NO: 119 - protein, 43 aa, Artificial Sequence
  Synthetic
NEDAERQAKELYKNGVDQKEIEEILKRLGVSDEEVKRILRRVG

SEQ ID NO: 120 - protein, 43 aa, Artificial Sequence
  Synthetic
TEDVEKLVEELVKRGYSKEQIRRILQKRGISDEEIEKALRKAW

SEQ ID NO: 121 - protein, 43 aa, Artificial Sequence
  Synthetic
KTVHVNGVQYHFSNPEDAYKFAVRLARELGLRLEFHGDTIRVE

SEQ ID NO: 122 - protein, 43 aa, Artificial Sequence
  Synthetic
DERVREVIEKLVRNNVSEEEIRKALKRWGVSDEEIERVLRQVM

SEQ ID NO: 123 - protein, 43 aa, Artificial Sequence
  Synthetic
DERVEKLVRELLRRGYDKEQVVEIAKRQGIDEDEVREVLDRIV

SEQ ID NO: 124 - protein, 43 aa, Artificial Sequence
  Synthetic
DEELEKIVRKAKREGLNEDQVVELLKRYGVSDEEAKEVVKKVF

SEQ ID NO: 125 - protein, 43 aa, Artificial Sequence
  Synthetic
TDKAEEIARRLKKNGFSPEQIERILRKLGVSTEEAERIKKELN

SEQ ID NO: 126 - protein, 43 aa, Artificial Sequence
  Synthetic
TTVTVNGKKFTFDTPEEAQKFAKKVAKKANLQIHIHGKKITVK

SEQ ID NO: 127 - protein, 43 aa, Artificial Sequence
  Synthetic
VEEVKKVVKRLLRNGVSEEEVKKILRRNGIDPREVEKAVRDAK

SEQ ID NO: 128 - protein, 43 aa, Artificial Sequence
  Synthetic
GQEAEERAREEWEKGRSKDQIKEILQKLGVSEDEAEEILRRLG

SEQ ID NO: 129 - protein, 43 aa, Artificial Sequence
  Synthetic
PKEEIEKKVRELARRGNKEEARRLAEEAGFSPDEVKRLIKEAE

SEQ ID NO: 130 - protein, 43 aa, Artificial Sequence
  Synthetic
TTVHVGNVTYHFSNPEEAYKFAVKIARELGRDFRVKDDTYHVE

SEQ ID NO: 131 - protein, 43 aa, Artificial Sequence
  Synthetic
DERLKKEVRKLYRNGVSPEQIREILKRQGVSPEEIEEILRAVF

SEQ ID NO: 132 - protein, 43 aa, Artificial Sequence
  Synthetic
DEDAEKIAKRLKRNGVSPDQIEEILRKLGVDEEVIKEIRKKLS

SEQ ID NO: 133 - protein, 43 aa, Artificial Sequence
  Synthetic
DEEAKKIFRDLLRRGVDPEEIKKVLRRLGISDEEVERIVREAS

SEQ ID NO: 134 - protein, 43 aa, Artificial Sequence
  Synthetic
PEEVDKIVEELQRRGVDNEQIIRILKKRGVSDEALKEVRKKLS

SEQ ID NO: 135 - protein, 43 aa, Artificial Sequence
  Synthetic
TEEDAKRIARELLKKGNKEEAERFARKAGLSEDAVNELKKEVF

SEQ ID NO: 136 - protein, 43 aa, Artificial Sequence
  Synthetic
PDELKEEVKKLLRNGVSPEQVKKYLRDQGLDPDQVKRIIDDVL

SEQ ID NO: 137 - protein, 43 aa, Artificial Sequence
  Synthetic
TTVHMGNITYHFDNPEQAVKFALRMAKELQLEIHFKGNTIEMH

SEQ ID NO: 138 - protein, 43 aa, Artificial Sequence
  Synthetic
KKDEIKKKAEEAVKKGDEDKARELLRRAGLTDDEASRFINEVL

SEQ ID NO: 139 - protein, 43 aa, Artificial Sequence
  Synthetic
SEKLKKIAEKLWRNGYDPDQIKEILKKLGASEQEAEDVLRWLL

SEQ ID NO: 140 - protein, 43 aa, Artificial Sequence
  Synthetic
LDELKKQVHELYRRGVSPEQLQRWLKKHGVSDEEVDKIVREAA

SEQ ID NO: 141 - protein, 43 aa, Artificial Sequence
  Synthetic
DPKELKKRVEEVLRRGDEDRAKELLRRAGISEEQIKEILRRLK

SEQ ID NO: 142 - protein, 43 aa, Artificial Sequence
  Synthetic
DEEVEKIVRDLLKKGVDEDQIRKYLERRGVDPREVEEAIRKVS

SEQ ID NO: 143 - protein, 43 aa, Artificial Sequence
  Synthetic
AEKVERLVEEIKRRGYNREQIRKILKRLGISDEEVDKAVKKVG

SEQ ID NO: 144 - protein, 43 aa, Artificial Sequence
  Synthetic
DEDVEKEVERLLRNGVSDDQIRKILRKQGISDEQVERVLQKIK

SEQ ID NO: 145 - protein, 43 aa, Artificial Sequence
  Synthetic
TTVVVGNKKYTFDNPEAAEKFAKKVAKKLGATVHKTNGTFKVK

SEQ ID NO: 146 - protein, 43 aa, Artificial Sequence
  Synthetic
SEEVKKIAQQLAKDGISEDQIREFLKRQGVSPDEAEEAIKAAR

SEQ ID NO: 147 - protein, 43 aa, Artificial Sequence
  Synthetic
SEDVEKIVREVRRKNLSEEEVERELRRRGVDKEIIDRVRRLLR

SEQ ID NO: 148 - protein, 43 aa, Artificial Sequence
  Synthetic
QPEEWKELAKEAIKEGNEDKARELLKRAGLNPDEIEQFIRDVK

SEQ ID NO: 149 - protein, 43 aa, Artificial Sequence
  Synthetic
PPDEWQKRASKALQNGNEDKARELLKQAGLSDEQAEKWIQKWA

SEQ ID NO: 150 - protein, 43 aa, Artificial Sequence
  Synthetic
DEEIKKEIERLYRNGIDPEQIVEILKRKGIDEDRVRKLVREVI

SEQ ID NO: 151 - protein, 43 aa, Artificial Sequence
  Synthetic
TTVHVGNVTYHFPNPEEAYKFALRVARELNLKIEVHGDTIRVE

SEQ ID NO: 152 - protein, 43 aa, Artificial Sequence
  Synthetic
KEELERRVEELARRGVSEEQIIKILKRQGYSDEEVRKIVKKAS

SEQ ID NO: 153 - protein, 43 aa, Artificial Sequence
  Synthetic
DEDAERHAKELARRGVDKDQIRKILKRLGVSDEEVERIVRKIG

SEQ ID NO: 154 - protein, 43 aa, Artificial Sequence
  Synthetic
EEEVKRRVEELLRRGYSEEEVVQILKRQGLDEDEVRRVVKELS

SEQ ID NO: 155 - protein, 43 aa, Artificial Sequence
  Synthetic
EPRELEKEAQEAYRQGDEDRAKDLLRKAGYSDEEAERYLRNLD

SEQ ID NO: 156 - protein, 40 aa, Artificial Sequence
  Synthetic
RITVTMEGDEAMKKWIELAKRRNLKVEWTKRNGKVILTLE

SEQ ID NO: 157 - protein, 40 aa, Artificial Sequence
  Synthetic
EIQWTVEGEEAARRMKEWAKKANLNIEVQVHNGRYIFTLK

SEQ ID NO: 158 - protein, 43 aa, Artificial Sequence
  Synthetic
PEDARQLAKELLDRGYSEDQISEILKRLGIDESEIRDALRYAR

SEQ ID NO: 159 - protein, 43 aa, Artificial Sequence
  Synthetic
RKEELEKKAKKAYKSGNPDKAREILKKAGYSEEEAERFLRKVF

SEQ ID NO: 160 - protein, 43 aa, Artificial Sequence
  Synthetic
DELEKRVKKIARKLNLSLDQVEEWLKRNNNDELVEAVKRLKKK

SEQ ID NO: 161 - protein, 43 aa, Artificial Sequence
  Synthetic
TTVEFNGLQFHFDNPEQMVKFALKVAKKLNLQVEFHGDTVKIE

SEQ ID NO: 162 - protein, 43 aa, Artificial Sequence
  Synthetic
DEEEKDLERRIRENPKDEEALRRFLKLRGVDDRQVEEIVRKVL

SEQ ID NO: 163 - protein, 43 aa, Artificial Sequence
  Synthetic
KDELVKQWRELERRGYSEEQVRRILQRRGVSDEEIKDVKRIAS

SEQ ID NO: 164 - protein, 43 aa, Artificial Sequence
  Synthetic
NEEVKKDVERLYKQGYSDDQIREILKRKGISDEEVEKAIRYAK

SEQ ID NO: 165 - protein, 43 aa, Artificial Sequence
  Synthetic
DEKVEKIVRKLQRNGISPEEVIKILRRQGIDPREVEKVVRDLS

SEQ ID NO: 166 - protein, 43 aa, Artificial Sequence
  Synthetic
DEKVEKIVERLLRNGVDEEQVREYLKRQNVDPREIEDVLRKAK

SEQ ID NO: 167 - protein, 40 aa, Artificial Sequence
  Synthetic
DETITVDGEELARKLWQMYVDRNLTVEVHRHGDKWVIHVS

SEQ ID NO: 168 - protein, 43 aa, Artificial Sequence
  Synthetic
TPEELKKLAEELARRGNVDEAKEALRRAGVSEDEIEEFERRAK

SEQ ID NO: 169 - protein, 43 aa, Artificial Sequence
  Synthetic
PEDEWLEKALKALRNGNREEVQKIAKKLGISEEELERRAREYG

SEQ ID NO: 170 - protein, 43 aa, Artificial Sequence
  Synthetic
DDHLREIVKKLLRNGVDPRQVVKILQKLGADEEEAKQVVREVS

SEQ ID NO: 171 - protein, 43 aa, Artificial Sequence
  Synthetic
TEKVKEIAKKLLENGLSEEQVEKALRKLGVSDQEIEEALRYAF

SEQ ID NO: 172 - protein, 43 aa, Artificial Sequence
  Synthetic
KEEELRRKAKELVRQGNEEEVKKVLRQAGLSDEQVERFIRRVL

SEQ ID NO: 173 - protein, 43 aa, Artificial Sequence
  Synthetic
PEEAEKVVRDLYRRGVSPDQIREILQRLGVDDDQVDKLIKKVT

SEQ ID NO: 174 - protein, 43 aa, Artificial Sequence
  Synthetic
PEEVERIVRDLYRKGVDERQIEEYLRRQGVSEEEIRDAQRKLR

SEQ ID NO: 175 - protein, 43 aa, Artificial Sequence
  Synthetic
PQKDLEKKAKEALKNGDTDTARELLKRAGYSEEEAERIIQKFL

SEQ ID NO: 176 - protein, 43 aa, Artificial Sequence
  Synthetic
KTVHVNGLKLTFPNPEEAQKAAKKFAKKYNLQVHIHGKTIHVK

SEQ ID NO: 177 - protein, 43 aa, Artificial Sequence
  Synthetic
TEVEVDNMTYTFNNPELMWKMAKKIAKSKGLTVELHGNTLKVT

SEQ ID NO: 178 - protein, 43 aa, Artificial Sequence
  Synthetic
PKEEAKRRAEKLIRSGNPEKAERLLRKAGVSEDEIKQFIKDVL

SEQ ID NO: 179 - protein, 43 aa, Artificial Sequence
  Synthetic
PEDELTERVKEILKNGTREDAERFLRKQGVSEDKVQEILKRAG

SEQ ID NO: 180 - protein, 40 aa, Artificial Sequence
  Synthetic
SIHITMDGEEQAKKWAKWAEEQNLEYRIEVHNGKWVIQID

SEQ ID NO: 181 - protein, 43 aa, Artificial Sequence
  Synthetic
DEKATKLFRDLKRRGYSDEQVKRILKRLGVSDEQLDEVDKLVG

SEQ ID NO: 182 - protein, 43 aa, Artificial Sequence
  Synthetic
DERVERIVKRLKRNGYSDDEIREILRKNGVDDREVDKVLRKVK

SEQ ID NO: 183 - protein, 40 aa, Artificial Sequence
  Synthetic
EITIEVDGEEQMKKIYKMLANRNYEVHVEKHGDRYVITAR

SEQ ID NO: 184 - protein, 43 aa, Artificial Sequence
  Synthetic
PEEIKREVEKLLRNGISEEEIVEILKRRGIDEEEVRRVIKKVS

SEQ ID NO: 185 - protein, 43 aa, Artificial Sequence
  Synthetic
DEEVEKIVKDLLDKNVDPREIRKELKKRGVSEEQVERVLRKVI

SEQ ID NO: 186 - protein, 43 aa, Artificial Sequence
  Synthetic
QDDERWIQELAKEAGISEDLAEEIFRRANGDRDKAEEIARRLS

SEQ ID NO: 187 - protein, 40 aa, Artificial Sequence
  Synthetic
TTKLTFDTEELARRAEKTARKKGLDVRLRKENGRWVLEIR

SEQ ID NO: 188 - protein, 43 aa, Artificial Sequence
  Synthetic
GEEVEKIIRELLRRGVDPRQVTEILKRNGYDEKEVRDVLRKVR

SEQ ID NO: 189 - protein, 43 aa, Artificial Sequence
  Synthetic
DERVEEEVRKLLQNGVDPDQVRKILKKKGVDEREVEEVIRRVL

SEQ ID NO: 190 - protein, 43 aa, Artificial Sequence
  Synthetic
DERVRRQVEELLRRGVSEEQIVEYLRRQGVDEKEVQKLVKELS

SEQ ID NO: 191 - protein, 43 aa, Artificial Sequence
  Synthetic
DDEEFQEKVKQVLENGDEDRAREILKKAGYSDEQVEKILRRLK

SEQ ID NO: 192 - protein, 43 aa, Artificial Sequence
  Synthetic
PPIEELAQEALKRANGNEDKAREIAQRLGVSPEQFERALKRLK

SEQ ID NO: 193 - protein, 43 aa, Artificial Sequence
  Synthetic
DKEELKRQVERLVKNGNEDEARKVLRRLGVDEKEVEEIVRRLS

SEQ ID NO: 194 - protein, 43 aa, Artificial Sequence
  Synthetic
DEKVEKIVKRLLKNGVDDRQVRDILRKRGVDEEVIKRAIRRVL

SEQ ID NO: 195 - protein, 40 aa, Artificial Sequence
  Synthetic
TTTQTVTDERNAREFAKELKKRGVTFTVRKHGTTFRVEIR

SEQ ID NO: 196 - protein, 40 aa, Artificial Sequence
  Synthetic
DIEITTNGEEDAKRVIKELQKRNLEYHIEVHGNQWVIKVR

SEQ ID NO: 197 - protein, 43 aa, Artificial Sequence
  Synthetic
PPEEALKEVVEALRQGDEERIRRIAKKLNIDEEELKRRAREAE

SEQ ID NO: 198 - protein, 43 aa, Artificial Sequence
  Synthetic
PEDLKKYAEQLLKNGYSVEQAERILRKNGVSEEEVQKVKKYLL

SEQ ID NO: 199 - protein, 43 aa, Artificial Sequence
  Synthetic
TTVKLGDIKVTFDNPEKAKKYAQKLAKIYQLTVHVHGDTIHVK

SEQ ID NO: 200 - protein, 43 aa, Artificial Sequence
  Synthetic
DEEVKKVVKRLKRNGVSPDEIREILKRQGVDPREVEKALREAL

SEQ ID NO: 201 - protein, 40 aa, Artificial Sequence
  Synthetic
RITLTVHGEEKAKKLVEMWRRRNYEVHATKHGDEIILHAD

SEQ ID NO: 202 - protein, 43 aa, Artificial Sequence
  Synthetic
ATVHVNGVTYHFNSPEEALKFALEMAKKLNLRLEVHNGTFHVE

SEQ ID NO: 203 - protein, 43 aa, Artificial Sequence
  Synthetic
DQEKYKEQIKEAVRRGDDERVEKLARRANLSEEIVKKLRKEAL

SEQ ID NO: 204 - protein, 43 aa, Artificial Sequence
  Synthetic
DEERIKKEVDEAVKRGDKERVRKLLKQRGLSDEQVDKIVRRLI

SEQ ID NO: 205 - protein, 43 aa, Artificial Sequence
  Synthetic
DEEEVKKRVKEVLKQGNEEEARRILKKAGFSDEEIERILRRLL

SEQ ID NO: 206 - protein, 43 aa, Artificial Sequence
  Synthetic
ATVHVKGVTYHFDNPEQAEKFAKRMAKELNGEVHVDGNTWHVD

SEQ ID NO: 207 - protein, 43 aa, Artificial Sequence
  Synthetic
DEREEEVRRALKRGEISEDDVRRILKKLGIDPRQVEKIIRDVL

SEQ ID NO: 208 - protein, 43 aa, Artificial Sequence
  Synthetic
ATVHVGNVTYHFDNPEEAYKFMLRMVKELNLTYEIHGNTWHVE

SEQ ID NO: 209 - protein, 43 aa, Artificial Sequence
  Synthetic
PEEVEKKVRELLRRGVDEEQVVEHLKRQGIDEEEVRRLVKRAS

SEQ ID NO: 210 - protein, 40 aa, Artificial Sequence
  Synthetic
RFQVHFEGEEQAKRFMKWAQEANLEYHIDIENNRWVVRVD

SEQ ID NO: 211 - protein, 43 aa, Artificial Sequence
  Synthetic
DERVERLVRELLRRGASEDDIKRVLKERGVDDEQVKKAIRKVI

SEQ ID NO: 212 - protein, 43 aa, Artificial Sequence
  Synthetic
VTVHVKGVTVTFDNPEQAVKFALKMAKSLGGRIEFHGNTIHVD

SEQ ID NO: 213 - protein, 43 aa, Artificial Sequence
  Synthetic
TTVEVNGKKFTFPSLDAAQKYAKKIAKKLGLHVEVHGQTITVK

SEQ ID NO: 214 - protein, 43 aa, Artificial Sequence
  Synthetic
DEDIKRIVRELRRRGVSDEEIKRILQRQGVDDRQVDRAVKEAK

SEQ ID NO: 215 - protein, 43 aa, Artificial Sequence
  Synthetic
DEEKLKRRVKEAVKNGDEDRVRELLKRLNVSDEEIEKFIKRVK

SEQ ID NO: 216 - protein, 43 aa, Artificial Sequence
  Synthetic
ATVHVNGVQYHFDSPEKALKFALKVARSLGLRVEMHGNTFHVE

SEQ ID NO: 217 - protein, 43 aa, Artificial Sequence
  Synthetic
PEEVKKIVKELKKQGVSEDEIREYLRRQGVDEDVVDRVIKEVG

SEQ ID NO: 218 - protein, 43 aa, Artificial Sequence
  Synthetic
PEEAKKVAEKLIKNGYSPEQIKRVLKSLGVSEDEAEKILRDLL

SEQ ID NO: 219 - protein, 43 aa, Artificial Sequence
  Synthetic
ITVEVNGVEYHFNNPEEAVKFALKMAKTYQLRIEFHGNRIRVE

SEQ ID NO: 220 - protein, 43 aa, Artificial Sequence
  Synthetic
TTVEVQGVEYRFDNPEEAEKFAKKMAKSLNLRVELHGNKWRVE

SEQ ID NO: 221 - protein, 40 aa, Artificial Sequence
  Synthetic
THTITVDTEEKARRIAEELKRRGLRVDLTKEGTTWKVTFD

SEQ ID NO: 222 - protein, 43 aa, Artificial Sequence
  Synthetic
TEDLQRYVEELLRRGVSLDEIRELLKRLGVSPDEADEALKAAG

SEQ ID NO: 223 - protein, 43 aa, Artificial Sequence
  Synthetic
DEELERQVEELWRRGVSEEEIEEYLRRQGVDPREIEEIKRRLR

SEQ ID NO: 224 - protein, 43 aa, Artificial Sequence
  Synthetic
TTVHINGVQYHFDNPEEALKFALKIAKEQNLEVRIRGDELHIE

SEQ ID NO: 225 - protein, 43 aa, Artificial Sequence
  Synthetic
PEELRRRVEELLRRGVDKEQVVEILKQQGFDEREVRKVLDEVL

SEQ ID NO: 226 - protein, 43 aa, Artificial Sequence
  Synthetic
LEKARKIAEELWKRGYSKEYIEEVLRRQGVSDEDAERALQIAE

SEQ ID NO: 227 - protein, 43 aa, Artificial Sequence
  Synthetic
SQETAKKIAEELIRRGNPDEAKKVLEKAGLSPDQAEEIVRRLK

SEQ ID NO: 228 - protein, 43 aa, Artificial Sequence
  Synthetic
ATVKFNGYEYHFDNPEQAEEFARRVAKKLNGRVELHNGTFHIE

SEQ ID NO: 229 - protein, 40 aa, Artificial Sequence
  Synthetic
EYHVTFEGEEQARKFIKWAKKQNLRVEFEVHNGQWHVTAK

SEQ ID NO: 230 - protein, 43 aa, Artificial Sequence
  Synthetic
AQALLKAFKILVKNNLTEVTVGDYTLTKGSDEFKWAEEYLKKA

SEQ ID NO: 231 - protein, 43 aa, Artificial Sequence
  Synthetic
IEEVERLVKRLLRNGVSDEQVERAVKKLGVDDRQVEEIIRKLK

SEQ ID NO: 232 - protein, 43 aa, Artificial Sequence
  Synthetic
DEELEEIVKELLRRGVDPRQVVEILKRLGASDEEAKRAVRLVL

SEQ ID NO: 233 - protein, 43 aa, Artificial Sequence
  Synthetic
DKEEWKRRVKDVVRKGDEERAKKILKRAGFSDEEVEKIVKDLL

SEQ ID NO: 234 - protein, 43 aa, Artificial Sequence
  Synthetic
DEEVRKIVERLLKNGVSEEEIIKILRRNGVDPKEVEKIVKELR

SEQ ID NO: 235 - protein, 43 aa, Artificial Sequence
  Synthetic
MEEAEKVAREAYKNGASPDDIEKLLRELGVSEEEIKRILKRVV

SEQ ID NO: 236 - protein, 43 aa, Artificial Sequence
  Synthetic
EDEAVKIFDRLKQQGISEEQVKKIVRRLGYDADDVERVYRERY

SEQ ID NO: 237 - protein, 43 aa, Artificial Sequence
  Synthetic
DEKKKDLKRQIKERNLDEEQVRKFLKRNGISDEEVERIVREVV

SEQ ID NO: 238 - protein, 43 aa, Artificial Sequence
  Synthetic
VTVDVNGVKYTFETPEKAKKFALKVAKELNARIEFHGNTIHIK

SEQ ID NO: 239 - protein, 40 aa, Artificial Sequence
  Synthetic
KETMTFHGEEALKRAIEYARRANLEAEIHVHGDQVIVHFK

SEQ ID NO: 240 - protein, 43 aa, Artificial Sequence
  Synthetic
TEEEIRKQVEKALKNGDEDRVRELLRKLGYSPEQVEEIIRRLK

SEQ ID NO: 241 - protein, 40 aa, Artificial Sequence
  Synthetic
TETYTFDDQEEAQKFAKKAKKNGLTVHLTKKNGKWQVTIQ

SEQ ID NO: 242 - protein, 43 aa, Artificial Sequence
  Synthetic
IEEVEKIVRKLKREGVSKEQIQKILQRRGVSDEEIRRVQRKVG

SEQ ID NO: 243 - protein, 43 aa, Artificial Sequence
  Synthetic
PEEIVRILRELKRRGVDDRQVREILRRNGYDPREIEKAEKAIS

SEQ ID NO: 244 - protein, 43 aa, Artificial Sequence
  Synthetic
PKEVEDIVRRLAKQGVDQEQIVEELKRRGVDEKDVRRLVKEVG

SEQ ID NO: 245 - protein, 43 aa, Artificial Sequence
  Synthetic
TQEEAKRKAEKALKNGNKEKAKRILEKAGIDPDKAEEIIQRLE

SEQ ID NO: 246 - protein, 43 aa, Artificial Sequence
  Synthetic
PEELEKEVKKLADNGVSEEELERWLRRNGVDPKDIKRILRRVS

SEQ ID NO: 247 - protein, 40 aa, Artificial Sequence [sequence omitted]

SEQ ID NO: 248 - protein, 40 aa, Artificial Sequence
  Synthetic
DITYHTHNEEVARRLYEMLARQNLDVKIEVHNGHWVVTAR

SEQ ID NO: 249 - protein, 40 aa, Artificial Sequence [sequence omitted]

SEQ ID NO: 250 - protein, 43 aa, Artificial Sequence
  Synthetic
TKEELKEEAKRAASEGNNDEARELLKKAGLSPQQAEEWLQKFH

SEQ ID NO: 251 - protein, 43 aa, Artificial Sequence
  Synthetic
DERLERRVEELKRNGVSDEEIKEWLRRAGLSPDQVKEVIDRVL

SEQ ID NO: 252 - protein, 43 aa, Artificial Sequence
  Synthetic
PQEELEKKAKEAIERGDDDTAKELLERAGYSPEEAERFIKNYK

SEQ ID NO: 253 - protein, 43 aa, Artificial Sequence
  Synthetic
DEEAEDVAKKLKRNGVDDEQIKEILKRLGVSDEAIKRVERKLR

SEQ ID NO: 254 - protein, 41 aa, Artificial Sequence
  Synthetic
EEAKKKAKQALKDGDDDKARELLERAGLDTDQAEKFIKKFK

SEQ ID NO: 255 - protein, 43 aa, Artificial Sequence
  Synthetic
DEEEVKRRIEELLRQGNEEEVKKLVRKYNLDPRIEEKLRKKVG

SEQ ID NO: 256 - protein, 43 aa, Artificial Sequence
  Synthetic
QDELLKRAKELIKNGVDPREVAKWLRRQGVDERLVREFEKQVS

SEQ ID NO: 257 - protein, 43 aa, Artificial Sequence
  Synthetic
DQEELKEEVKEAIKNKDEEKVRRLLKRQGLSDDEVDKIVRELL

SEQ ID NO: 258 - protein, 43 aa, Artificial Sequence
  Synthetic
LEEVTRKVRELLRRGYSEEQVSRILQKQGVSDEEIKKAQELAK

SEQ ID NO: 259 - protein, 43 aa, Artificial Sequence
  Synthetic
IEEVEKLIRRLLQNGVSDEEVIRRVKRKGVDERQVKEVIRRIK

SEQ ID NO: 260 - protein, 43 aa, Artificial Sequence
  Synthetic
FTVHMGNVTYHFSSPEEALRFALRMAKELGLQVEVHGETMKVK

SEQ ID NO: 261 - protein, 43 aa, Artificial Sequence
  Synthetic
ITVHVNGVQYHFNNPEEVKKFVRKMAETYNLRVEVHGNTFHIE

SEQ ID NO: 262 - protein, 43 aa, Artificial Sequence
  Synthetic
DEEEIVKQYEKLRRRGDEDEIRKLARDLGLSEEQLDKLVKKIK

SEQ ID NO: 263 - protein, 43 aa, Artificial Sequence
  Synthetic
VQEEIKKKVEEVVRQGDEKRARELLKRAGVSDEEIDKFIRRVL

SEQ ID NO: 264 - protein, 43 aa, Artificial Sequence
  Synthetic
PSDELKERAKEALKNGNEDKARKLLQKAGASPEEIEKFIQKFL

SEQ ID NO: 265 - protein, 43 aa, Artificial Sequence
  Synthetic
LDELVEQVRRLLRNGVDPREVQEILRRQGVSEEEVKKVVKKAS

SEQ ID NO: 266 - protein, 43 aa, Artificial Sequence
  Synthetic
EDEVRKLVEKLLRSGVDEEEVKKILKKRGVDPDKVEKLLKELK

SEQ ID NO: 267 - protein, 43 aa, Artificial Sequence
  Synthetic
DEDKDRKRVEELLRQGNEEEVRKYLKKLGFSDEEVEKIIREVL

SEQ ID NO: 268 - protein, 43 aa, Artificial Sequence
  Synthetic
PDEVRKIVEDLLRRGVSDEEVVEYVKRQGVDEDEVRKIVKEVS

SEQ ID NO: 269 - protein, 43 aa, Artificial Sequence
  Synthetic
NDEVKKIVEDLLRQGVDDRQIKEYLQRRGVSDEEVERAIRDLK

SEQ ID NO: 270 - protein, 43 aa, Artificial Sequence
  Synthetic
DEKLKRQVERLLKNGVSEEEVQRYLRKQGVDERQVQRIVKELS

SEQ ID NO: 271 - protein, 43 aa, Artificial Sequence
  Synthetic
VTVHVGNLTFHFPTPEEAYKFAMKMAKELQLRVEFHGNQIDIE

SEQ ID NO: 272 - protein, 43 aa, Artificial Sequence
  Synthetic
DERLERKVRELKRRGVDERQVLEIFRRQGVSEEQLKEVKRILS

SEQ ID NO: 273 - protein, 43 aa, Artificial Sequence
  Synthetic
RDELKKELEKLLRNNVSPEEAAQWARDAGYSEDLARELLKEAE

SEQ ID NO: 274 - protein, 43 aa, Artificial Sequence
  Synthetic
SEKADRIVERLQRQGVSPEQVLKILKRLGVDDREIDEVRKKLG

SEQ ID NO: 275 - protein, 40 aa, Artificial Sequence
  Synthetic
GETWRVRGEEQMKKIIEMLRRRNLTVKIQQHGDEFIIHAE

SEQ ID NO: 276 - protein, 43 aa, Artificial Sequence
  Synthetic
EEKLERIVEEVRRKNLDEEQVRRLAKRVGLSDEQVEKLVRLVK

SEQ ID NO: 277 - protein, 43 aa, Artificial Sequence
  Synthetic
GEVHINGVTYTFDNPEEAKKFALEMARKLGLRIEIHGNTIKVE

SEQ ID NO: 278 - protein, 43 aa, Artificial Sequence
  Synthetic
MDEYRKHVKKLKRQGLSPEQIKDILRRLGLSPEQVERVLKAVG

SEQ ID NO: 279 - protein, 43 aa, Artificial Sequence
  Synthetic
NEKLKKLIEQVRRQGLSEDEIREYLKRQGVDDREVERVVQEVS

SEQ ID NO: 280 - protein, 43 aa, Artificial Sequence
  Synthetic
SDSDKRKIFRDAVKSGNRDKAKELARRLGLSEEEIEKLEREAG

SEQ ID NO: 281 - protein, 43 aa, Artificial Sequence
  Synthetic
LEEVKKVIKKLKREGASDEEIIEYVKRQGVDEKEVRELVKKLG

SEQ ID NO: 282 - protein, 43 aa, Artificial Sequence
  Synthetic
IEKAERIARELLKRGVNPEEIERILQKAGIDPEEAQKALKRAL

SEQ ID NO: 283 - protein, 43 aa, Artificial Sequence
  Synthetic
TTVQVNGQKIELPLSPEQAAKWAKKAFPHAEVHVKGNYVEVHE

SEQ ID NO: 284 - protein, 43 aa, Artificial Sequence
  Synthetic
TEEVRKIIEELKRRGVDDEQVVEILKRNGYDEREVREVLKEIS

SEQ ID NO: 285 - protein, 43 aa, Artificial Sequence
  Synthetic
TERAKKRARELIENGVTPEKAKEILKKEGVNPQEAEEAIQWAV

SEQ ID NO: 286 - protein, 43 aa, Artificial Sequence
  Synthetic
SQEEAKERAREALERGDEDKAREILRKAGISDDEADEVLTRLR

SEQ ID NO: 287 - protein, 43 aa, Artificial Sequence [sequence omitted]

SEQ ID NO: 288 - protein, 40 aa, Artificial Sequence
  Synthetic
EITITVHGEEQAKKVLELAKKRNYKAELEVRGDRIIIHLK

SEQ ID NO: 289 - protein, 43 aa, Artificial Sequence
  Synthetic
VEKQRVLRLIAKLLGLDEEQVEEWLKRQNISEEQAKRIADRVG

SEQ ID NO: 290 - protein, 43 aa, Artificial Sequence
  Synthetic
ATVHVNGVQYDFDNPEEAVKFALKVAKKLNLRIEFHGNTIHIE

SEQ ID NO: 291 - protein, 43 aa, Artificial Sequence
  Synthetic
EEEVKRRVEKLLRNGVDDDQIVKIIRKLGYSEEQARKIVKEVA

SEQ ID NO: 292 - protein, 43 aa, Artificial Sequence
  Synthetic
PDEAKQRVKDLLQKGASKDEIEEWARRQGVSSSVVEQAIREWS

SEQ ID NO: 293 - protein, 43 aa, Artificial Sequence
  Synthetic
DDRIEELVQRLLKQGLSEEQVVRVLKRQGFDEDEVREVVEKAS

SEQ ID NO: 294 - protein, 43 aa, Artificial Sequence
  Synthetic
SDEVKKQVEKLLRSGVDEEQIKRWIQKQGYSPEDAKKILREVK

SEQ ID NO: 295 - protein, 43 aa, Artificial Sequence [sequence omitted]

SEQ ID NO: 296 - protein, 43 aa, Artificial Sequence
  Synthetic
TEEVERQVRRLLRNGVDDDQVVEILRKQGVDEDEVREVVKKAK

SEQ ID NO: 297 - protein, 40 aa, Artificial Sequence
  Synthetic
EFEIETEGEEAVKKAIKYAQKHNLEYHVRREGDRWVVTLK

SEQ ID NO: 298 - protein, 43 aa, Artificial Sequence
  Synthetic
PEELRRVVEQLLRDGVSPEQVKRVARRLGYSDEEVERVIRQIL

SEQ ID NO: 299 - protein, 43 aa, Artificial Sequence
  Synthetic
QDEAEKEARKLYKNGASEDEIRKRLQELGVSTDQANEILRELR

SEQ ID NO: 300 - protein, 43 aa, Artificial Sequence
  Synthetic
LEELKKKLKKLLDQGVSEEDLKKWLKKQGVSDEEVEKLVKEVS

SEQ ID NO: 301 - protein, 43 aa, Artificial Sequence
  Synthetic
DEKVERILRELLRRGIDKRQVAEIVKRQGVDEKQIERVLRKLG

SEQ ID NO: 302 - protein, 43 aa, Artificial Sequence
  Synthetic
DEEVEKLVEKLLKKGYSDEQIRRYLKKKGVDDREIERAQRRVK

SEQ ID NO: 303 - protein, 43 aa, Artificial Sequence
  Synthetic
LDELVKQVRELKKNGVDDRQVREYLKRQGVSDEQIKKVERKVS

SEQ ID NO: 304 - protein, 43 aa, Artificial Sequence
  Synthetic
LDDVERIWRELEKQGVDPRQIREYLRRQGINPEQIKEVEKRLS

SEQ ID NO: 305 - protein, 40 aa, Artificial Sequence
  Synthetic
DIQIDTHGEEDARKVAEEWRRRNYEAHVEVHNGKWIVKVK

SEQ ID NO: 306 - protein, 43 aa, Artificial Sequence
  Synthetic
TKELEDKVRKLARQGVDEEQIKEWLKRQGVDPREIEEIIRRIR

SEQ ID NO: 307 - protein, 43 aa, Artificial Sequence
  Synthetic
KEEYKKQVKELQKNGVDDDQIRKILKRHGLSDEEVERIIRDVK

SEQ ID NO: 308 - protein, 43 aa, Artificial Sequence
  Synthetic
KEDIEKQVRELVKNGVDPRQIKEYLKRQGVSDEEVKRILRRAL

SEQ ID NO: 309 - protein, 43 aa, Artificial Sequence
  Synthetic
ATVHVGNVTFHFDNPEQAKEFAKRMAEKLNLRVEIHNGEIHVE

SEQ ID NO: 310 - protein, 43 aa, Artificial Sequence
  Synthetic
DEEATKEVRKLLRNGVDPRQVEEWLRRLGLSDEQVRRVLEQAI

SEQ ID NO: 311 - protein, 43 aa, Artificial Sequence
  Synthetic
PEEVKRLIDELKKRGVSDEEIRKYLQRQGISDEEIEEAQRLWS

SEQ ID NO: 312 - protein, 40 aa, Artificial Sequence
  Synthetic
TTTYTYTDKEAAQKAYKKAKNQGLEVHITQNGDQYQVTIH

SEQ ID NO: 313 - protein, 43 aa, Artificial Sequence
  Synthetic
DKEVEDTIRRLLRNGVSEDQITERVKRLGVDEEEVKRVIKKIR

SEQ ID NO: 314 - protein, 43 aa, Artificial Sequence
  Synthetic
DDRVREIAERLKRRGYSEEEIKDILRKLGVDEEQVKDVERYLR

SEQ ID NO: 315 - protein, 43 aa, Artificial Sequence
  Synthetic
DEEVERIVKRLLDQGIDPKQVKEILKRRGVDPREVDEAVKRVL

SEQ ID NO: 316 - protein, 43 aa, Artificial Sequence
  Synthetic
IDELKKDVERLKREGVSKEQIKKILKRRGVDDDQVEKVVRAVG

SEQ ID NO: 317 - protein, 43 aa, Artificial Sequence
  Synthetic
TEDKARELIREAVQKGNEDKARELAKRIGVDESEAERIIRELK

SEQ ID NO: 318 - protein, 43 aa, Artificial Sequence
  Synthetic
ITVHVGNVTYHFDTPEEALKFVLKVARSLNLRLEVHGNTFRIE

SEQ ID NO: 319 - protein, 43 aa, Artificial Sequence
  Synthetic
NEELKRQVEKLYKNGVSEEELKRYLKKQGVSDEQVDKIVKDVL

SEQ ID NO: 320 - protein, 43 aa, Artificial Sequence
  Synthetic
SKEEARERVERALKNGDEETAKKIAKSAGYSEDWVEELKRRQV

SEQ ID NO: 321 - protein, 43 aa, Artificial Sequence
  Synthetic
DDKLREIIRELLERGYNPDEAKEIAEKLGYSRDEAEEALRQAL

SEQ ID NO: 322 - protein, 43 aa, Artificial Sequence
  Synthetic
TEELEKIVRRLYRSGVSPEQIKEILKRLGASDEEVDKIVKKVA

SEQ ID NO: 323 - protein, 43 aa, Artificial Sequence
  Synthetic
DERVERIVKRLLRNGVDPRQIREILQRNGVSDEEIDHVLRKVL

SEQ ID NO: 324 - protein, 43 aa, Artificial Sequence
  Synthetic
SQEDAKKKAEEALRRNNEDKAREILQRAGFSPEEADRILKKLK

SEQ ID NO: 325 - protein, 43 aa, Artificial Sequence
  Synthetic
DQEEFKDEVRKVLKQGDEERAKKILKRAGLSDEQVEKVLKRLK

SEQ ID NO: 326 - protein, 43 aa, Artificial Sequence
  Synthetic
PDELKKQVEKLLREGVSPDQIKEYLKRAGVSDEEVDKIVKEVL

SEQ ID NO: 327 - protein, 40 aa, Artificial Sequence
  Synthetic
DITITVTGEEAAKKVIKWAKAHNLQVEVHVHGDQFVIHIH

SEQ ID NO: 328 - protein, 43 aa, Artificial Sequence
  Synthetic
DQEELKEQIKEALRRGDEEKVRRLAKRIGLSDEQVEELRKRLS

SEQ ID NO: 329 - protein, 40 aa, Artificial Sequence
  Synthetic
RIRIETDGEEDAKRVLEWAKKANLRAEVRIENGKFIIHIE

SEQ ID NO: 330 - protein, 43 aa, Artificial Sequence
  Synthetic
DDDARKIVEELLRKGVSPEEIKRHLKRRGVDERIVERLIQEVR

SEQ ID NO: 331 - protein, 40 aa, Artificial Sequence
  Synthetic
TTTYTFHDKKQAQQFAKKLQKLGVPYTLTQTNGTWQVKKH

SEQ ID NO: 332 - protein, 43 aa, Artificial Sequence
  Synthetic
VTVTVNGVQYDFSNPEEAVRFALRVAKELNGKIEFHGNHIKVE

SEQ ID NO: 333 - protein, 43 aa, Artificial Sequence
  Synthetic
EPEQLKEIARELAERGNKDKARKVLEKAGLSPDQAEEFIRRVD

SEQ ID NO: 334 - protein, 43 aa, Artificial Sequence
  Synthetic
DEDAKKLAKKLYKKGYSPDQIRKIAREQGADENAVEEALKELN

SEQ ID NO: 335 - protein, 43 aa, Artificial Sequence
  Synthetic
TDEAKKLAEKLKREGWSTDEIKDILRKLGVSEEEIKEAEKYLR

SEQ ID NO: 336 - protein, 43 aa, Artificial Sequence
  Synthetic
DERVEKAVEKLLKDGYSPEQVVKILKRRGIDEKEVREVIKKLS

SEQ ID NO: 337 - protein, 43 aa, Artificial Sequence
  Synthetic
PKEELLKEAYKAIQNNDDEKVQRIAKKLNISEEQLRREAKKYV

SEQ ID NO: 338 - protein, 43 aa, Artificial Sequence
  Synthetic
MDEVRKRVEDLLRNGVDEDQVVKYIARLGFDERQARRIVKEVS

SEQ ID NO: 339 - protein, 43 aa, Artificial Sequence
  Synthetic
TEDVEKIVRRLLRQGVDKRQVKEILERQGVDPRQVEHVLKKVG

SEQ ID NO: 340 - protein, 43 aa, Artificial Sequence [sequence omitted]

SEQ ID NO: 341 - protein, 43 aa, Artificial Sequence
  Synthetic
MQVHVDGVTYTFPNPEEALKFALKMARKKGARVEVHNGQIRIE

SEQ ID NO: 342 - protein, 43 aa, Artificial Sequence
  Synthetic
LDEWRKQVERLLRNGVDPRQVRELLRRQGVSPEEVDRIVREVS

SEQ ID NO: 343 - protein, 43 aa, Artificial Sequence
  Synthetic
NEKVEKIVEELLRRGYSEEDIRRYLKKQGIDDREVDRAIKKVG

SEQ ID NO: 344 - protein, 43 aa, Artificial Sequence
  Synthetic
DEEVRRIVKDLADKGVSPEQIVKILRRQGFDPREVEKIVREVG

SEQ ID NO: 345 - protein, 43 aa, Artificial Sequence
  Synthetic
DERVEELVRRLLRNGVDPRQVRDILRRQGVDPREVDKAIKKVL

SEQ ID NO: 346 - protein, 40 aa, Artificial Sequence
  Synthetic
AVTFTFDGEEQAVRFYREVAKQNLPVEIKQENGKWHVTVK

SEQ ID NO: 347 - protein, 43 aa, Artificial Sequence
  Synthetic
SDEARKIAEKLKKKGVSPEEIKRILKKLGVSEEEAEKIARELS

SEQ ID NO: 348 - protein, 43 aa, Artificial Sequence
  Synthetic
DEELKKKVKKLVDQGVSEDEIVEYLKKQGVSDEEARKIVQEVM

SEQ ID NO: 349 - protein, 43 aa, Artificial Sequence
  Synthetic
TEDLKEYARELVKRGVSPEEVKKILEKLGVSPEEAEKLAQEAE

SEQ ID NO: 350 - protein, 40 aa, Artificial Sequence
  Synthetic
QFTIKVRGEEKAKKWIEYANRANLEYEVRTENGDIIITFK

SEQ ID NO: 351 - protein, 43 aa, Artificial Sequence
  Synthetic
DEREKRVRDEVKKKQLNEEQIQELLRRLGFSDEEVERIVRRLK

SEQ ID NO: 352 - protein, 43 aa, Artificial Sequence
  Synthetic
SQEDVKEKVKDVVRSGNEEEARKILRRAGFSEEQIDKIIRRLL

SEQ ID NO: 353 - protein, 43 aa, Artificial Sequence
  Synthetic
AQVTVNGVTYQFDNPEEAEKFARRMAKELGLEIRVKDGRWRVE

SEQ ID NO: 354 - protein, 43 aa, Artificial Sequence
  Synthetic
DDRVKELVKRLLDQNVSKEEVKKILRKRGVNEEEVEKALKQLD

SEQ ID NO: 355 - protein, 43 aa, Artificial Sequence
  Synthetic
LDELVKEVKRLYDQGVSEDQLREYLRRQGVSPEEVERLIKKAI

SEQ ID NO: 356 - protein, 43 aa, Artificial Sequence
  Synthetic
PEEVERIVRDLLRRGVDPREIRKILQDRGVDDREVDRVIKKVL

SEQ ID NO: 357 - protein, 43 aa, Artificial Sequence
  Synthetic
DERVERIVEKLARNGVSEDEIREYLRRQGVSPEEVDRVIKRVM

SEQ ID NO: 358 - protein, 43 aa, Artificial Sequence
  Synthetic
PEEIEKKVRDLLDRGVDPDQVKKRLKKQGVDPRVIDEVIKKWS

SEQ ID NO: 359 - protein, 43 aa, Artificial Sequence
  Synthetic
TEKLKKIVEQLVKEGVSPDEIREIARKLGFSDQEADEAIKWVL

SEQ ID NO: 360 - protein, 43 aa, Artificial Sequence
  Synthetic
DDRVRELVKRLLDNGVDDEQVVEQLKRQGVDEREVRELVKQIK

SEQ ID NO: 361 - protein, 43 aa, Artificial Sequence
  Synthetic
PDEKKKIIEELYRRGLSEEEIRREAQKAGIDDDVIEEALRRIG

SEQ ID NO: 362 - protein, 43 aa, Artificial Sequence
  Synthetic
PKRVEDIIRDLKRKGVSDEEVSRYLKRQGVDPREIEEVIKKVR

SEQ ID NO: 363 - protein, 43 aa, Artificial Sequence
  Synthetic
SEDELRKRAEEALRRGNTEEARKALEKAGYSPDEAEEIIRRFL

SEQ ID NO: 364 - protein, 43 aa, Artificial Sequence
  Synthetic
DEEEEAIKQVAKLLNIDEEQVKELVKKLNVSAQELVEWVRKHL

SEQ ID NO: 365 - protein, 40 aa, Artificial Sequence
  Synthetic
GVTYTFDGKEQAVRFAKKMKKHNLRAEVHVKNGKWVVDVE

SEQ ID NO: 366 - protein, 43 aa, Artificial Sequence
  Synthetic
MTVHVGNVTYHFPNPEEAKKFAKKMAKTYNLRVEIHGNTIHVQ

SEQ ID NO: 367 - protein, 43 aa, Artificial Sequence
  Synthetic
DEDIEKKIRKLLRNGVSPEEVVRIVKRDGADEREVREVVRRVL

SEQ ID NO: 368 - protein, 43 aa, Artificial Sequence
  Synthetic
VERAKEIYKEVRRKNLSSEQLERLLRRAGVDERLVQRLVREFS

SEQ ID NO: 369 - protein, 43 aa, Artificial Sequence
  Synthetic
DEEVKKIVRRLIRSGVDPRQVEEILRRNGVDPREVKKAIDEAS

SEQ ID NO: 370 - protein, 43 aa, Artificial Sequence
  Synthetic
EQERLRRIAEELVRRGDPDSARKALEKAGVSPEEAERFIQNVG

SEQ ID NO: 371 - protein, 43 aa, Artificial Sequence
  Synthetic
TQEELKKQVKKAIKNGDEERARKLLQRVGYSDEQVEKIIRKVL

SEQ ID NO: 372 - protein, 40 aa, Artificial Sequence
  Synthetic
RITMTFDGEEAAKKAQEWAKKQNLRFEVRQHGNQWVITID

SEQ ID NO: 373 - protein, 43 aa, Artificial Sequence
  Synthetic
DEEVEKIVRELKKNGVDDEQVTKILRRLGLDERQVRELIRRVA

SEQ ID NO: 374 - protein, 43 aa, Artificial Sequence
  Synthetic
QTVHVKGVQYHFPNPEEAVKFALKVAKDLGGRVEFHGDEIHVE

SEQ ID NO: 375 - protein, 43 aa, Artificial Sequence
  Synthetic
KEVHVNGVTYKFNNPEEAYKFAVRMAKELGMTYTVHGDTLKVE

SEQ ID NO: 376 - protein, 43 aa, Artificial Sequence
  Synthetic
DEEVERRVRELQKNGVDRDQIKRILKRQGVDDRVIREIEKKLG

SEQ ID NO: 377 - protein, 43 aa, Artificial Sequence
  Synthetic
PEELEKKAEELVRNGWDPRQVEEWLRRNGVDEREVQRIVRKVS

SEQ ID NO: 378 - protein, 43 aa, Artificial Sequence
  Synthetic
PEELEEQVRRLLRNGVDEEQIKEQLKRQGVDPRQVERLVRLAR

SEQ ID NO: 379 - protein, 43 aa, Artificial Sequence
  Synthetic
SQVHIGDTTYTFDTVEKAIRYAKKLAKEYNATVHVHGTTITVK

SEQ ID NO: 380 - protein, 43 aa, Artificial Sequence
  Synthetic
DEKVEKTVERLKRNGVSADQIAEILRRLGVDERVVRKIYRELE

SEQ ID NO: 381 - protein, 43 aa, Artificial Sequence
  Synthetic
IEELEKLVRDLQKQGVSDEEVVQILKRRGYDEREVREVVRRVN

SEQ ID NO: 382 - protein, 43 aa, Artificial Sequence
  Synthetic
NEEVRRTVERLLKNGISDEEIKDYLRRQGYSPEEVEKVLREIK

SEQ ID NO: 383 - protein, 43 aa, Artificial Sequence
  Synthetic
ATVHVQGVTYHFENPEKADEFARRMAKKLNLRLEIHGNTWRVE

SEQ ID NO: 384 - protein, 43 aa, Artificial Sequence
  Synthetic
KTVHVNGVTYHFDNPEEAKKFALKVARDLNLTLEMRGNTWHVE

SEQ ID NO: 385 - protein, 43 aa, Artificial Sequence
  Synthetic
NPELEQIAEELLRNGVTDDQARKILKKLGVSPELAERLLQRAK

SEQ ID NO: 386 - protein, 43 aa, Artificial Sequence
  Synthetic
TTVHVNGVQYDFENPEEALKFALRLAKELNLQIHVEGDRIRVE

SEQ ID NO: 387 - protein, 43 aa, Artificial Sequence
  Synthetic
TTVHINGVEYRFDNPEEALRFALEMAKKLNLRVEVHGETIHVE

SEQ ID NO: 388 - protein, 43 aa, Artificial Sequence
  Synthetic
NDEVTKEVRRLLRQGVSPEQIKEYLRRQGVSPEEVREALEKAL

SEQ ID NO: 389 - protein, 43 aa, Artificial Sequence
  Synthetic
SKDELEEKARKLAKNGNEDQARELLRKAGFDESEAEQIIREAK

SEQ ID NO: 390 - protein, 43 aa, Artificial Sequence
  Synthetic
QTVHVGNVTYHFDNPEEAYKFAVRVAKELGRRVEVHGDEIHVQ

SEQ ID NO: 391 - protein, 43 aa, Artificial Sequence
  Synthetic
DERVERIVRELLKRGFSKDEVKRKLKKQGLDPKAVDEAVKKVS

SEQ ID NO: 392 - protein, 43 aa, Artificial Sequence
  Synthetic
DEKVEEIVRRLYRSGVDPEQIKEILKRQGVSDEDVRKAVERAV

SEQ ID NO: 393 - protein, 43 aa, Artificial Sequence
  Synthetic
DERDKRIEEIARELGVDPRVVRKLLKEANGDEDKVKEILRRRK

SEQ ID NO: 394 - protein, 43 aa, Artificial Sequence
  Synthetic
LDELKKIVEELKRRGISKDQIKEILKRRGVSDEQVDRAVKAAG

SEQ ID NO: 395 - protein, 43 aa, Artificial Sequence
  Synthetic
TTVHVNNETYHFPDPTEVERFVRKLVKKLGLQVTRHGDTWRIE

SEQ ID NO: 396 - protein, 43 aa, Artificial Sequence
  Synthetic
PEEEIKKEVEKAVRNGDSDKVRELLKRRGIDPRQVEEIIQKLL

SEQ ID NO: 397 - protein, 43 aa, Artificial Sequence
  Synthetic
REDEAKERAKKALDEGNKDKARELLERAGISPEEAEKIIRKYL

SEQ ID NO: 398 - protein, 43 aa, Artificial Sequence
  Synthetic
RDDAKKWFDELWKRGYSPEEIREILKRLGFSPKEAEEAERAAL

SEQ ID NO: 399 - protein, 40 aa, Artificial Sequence
  Synthetic
EIRIHTHGEEQAKRIAEMWKKRNYEAHVEVENGEFVVKVK

SEQ ID NO: 400 - protein, 43 aa, Artificial Sequence
  Synthetic
DEEVERQIRELKRRGVSKDQIIEILKRQGVDEDDVRRILKEIG

SEQ ID NO: 401 - protein, 43 aa, Artificial Sequence
  Synthetic
DERLERRARKLYKSGVSKDQIRKFLKDQGVDDREVEEILRKVV

SEQ ID NO: 402 - protein, 40 aa, Artificial Sequence
  Synthetic
EFTIRVEGEEKAKKIIEMLKRRNLEVHVEVRGDEFHITAK

SEQ ID NO: 403 - protein, 40 aa, Artificial Sequence
  Synthetic
TLTYTTTDREEARRWKEWAEKAGLTVTVTERNGKFEVRVE

SEQ ID NO: 404 - protein, 43 aa, Artificial Sequence
  Synthetic
SEEARRRIERLLRNGVSDEEIEKIARRQGIDPDEVRKLIKQLK

SEQ ID NO: 405 - protein, 40 aa, Artificial Sequence
  Synthetic
SITIKITGEEKAMRVMKYLRAQNLEVHVEIRGDDVVLHAD

SEQ ID NO: 406 - protein, 43 aa, Artificial Sequence
  Synthetic
TTVHVNGVQYHFDNPEEAKKFAKRMAKELNLRVELHNGTWHIE

SEQ ID NO: 407 - protein, 43 aa, Artificial Sequence
  Synthetic
RDDVTEIVKELLRRGVSDDEVKEILRRQGVDPKEVDEAVKKAK

SEQ ID NO: 408 - protein, 43 aa, Artificial Sequence
  Synthetic
SDEAEKVARKLAKNGATRDQIEEVLRRLGASDDEIKQILKNIG

SEQ ID NO: 409 - protein, 43 aa, Artificial Sequence
  Synthetic
DEKVEKIVEELVKRGVSKEEIRKILKRQGVSDEEVDRVLREIY

SEQ ID NO: 410 - protein, 43 aa, Artificial Sequence
  Synthetic
TPEELKKKAEKLARNGNREEAKRLLQEAGYSEEEAERIVRKLG

SEQ ID NO: 411 - protein, 43 aa, Artificial Sequence
  Synthetic
DEEVERIVRELLKRGVDPRQVEEILRRRGVDERQIKKAQRRVS

SEQ ID NO: 412 - protein, 40 aa, Artificial Sequence
  Synthetic
SITYTFDGKEAADKFMKWAKANNLEAHIKVENGKYIITIK

SEQ ID NO: 413 - protein, 43 aa, Artificial Sequence
  Synthetic
SDEQEIARELKERANGDKDKIRELAKRLGFSEDEADKLARLAD

SEQ ID NO: 414 - protein, 43 aa, Artificial Sequence
  Synthetic
PEKAKKLVEQAVRNGLSEEQIRRYAKKAGISPSIIEEALKEIF

SEQ ID NO: 415 - protein, 43 aa, Artificial Sequence
  Synthetic
DEELKKIVERLLRNGISPDEVREILKRQGVSDEEIEEALKRVV

SEQ ID NO: 416 - protein, 43 aa, Artificial Sequence
  Synthetic
TDEVEKEIRKLLKNGVSLDEIKRWLKEQGVSEEKAQRLADKAK

SEQ ID NO: 417 - protein, 43 aa, Artificial Sequence
  Synthetic
EPERLEREARKALKNGDPDLAEELLRRANLSPEEIRRVIEEFN

SEQ ID NO: 418 - protein, 43 aa, Artificial Sequence
  Synthetic
ITVHLNGVTYHFSNPEEAEKFAKEMAKRLGLKLEVHNGTYHIE

SEQ ID NO: 419 - protein, 43 aa, Artificial Sequence
  Synthetic
SKVNVGDTTYHFDTPEAAIKWAKKFAKKKGLTVHVDGKTITIK

SEQ ID NO: 420 - protein, 40 aa, Artificial Sequence
  Synthetic
TTSITYTDKTEAQRAYEEAKRRGLDVQLTKENGYWVLKIT

SEQ ID NO: 421 - protein, 43 aa, Artificial Sequence
  Synthetic
SPEDARRKAEEAVRNGNKEKARKILESAGYSEDEAKKFIKKVE

SEQ ID NO: 422 - protein, 43 aa, Artificial Sequence
  Synthetic
SDRAREIAERLLRNGFSPEQIERILKKLGVSEEEAQQAIKDVL

SEQ ID NO: 423 - protein, 43 aa, Artificial Sequence
  Synthetic
NSKAEEIARELIERGVSKEEIKRILKKAGVSEEEAERALRKLE

SEQ ID NO: 424 - protein, 43 aa, Artificial Sequence
  Synthetic
PQDARDAYRKLQKQGVSTDEAKKYLQKLGLSPDEAEQVIQEAE

SEQ ID NO: 425 - protein, 43 aa, Artificial Sequence
  Synthetic
VTVHVNGLTYHFDNPEEAYKFAVRLAKELNLKIEFHGNTIHVE

SEQ ID NO: 426 - protein, 43 aa, Artificial Sequence
  Synthetic
VTVHVGNYTFHFDNPEEAEKFARRIAKELQLKLEFHGNTIRIE

SEQ ID NO: 427 - protein, 43 aa, Artificial Sequence
  Synthetic
PDELKKEAQELKKNGYSDDQIRKILKRQGVSDEEVEQVIRAVK

SEQ ID NO: 428 - protein, 43 aa, Artificial Sequence
  Synthetic
DEEEKKVLEALRRGEISEEQVKELLQRLGVDDEQVERLIRRAK

SEQ ID NO: 429 - protein, 43 aa, Artificial Sequence
  Synthetic
DEKVTKIWERLYRNGVDNEQIKEYLKRQGISDEQIRQAERLVL

SEQ ID NO: 430 - protein, 43 aa, Artificial Sequence
  Synthetic
KTVKLDGVQYDFPNPEEAVKFALKVARERGLRIEFHGDEIRVE

SEQ ID NO: 431 - protein, 43 aa, Artificial Sequence
  Synthetic
TEVHVNGVTYHFDNPEEAYKFVRKIAETYNLTMHIDGDRVEVR

SEQ ID NO: 432 - protein, 43 aa, Artificial Sequence
  Synthetic
TEEVERKVKRLLENGVDEEEIVERLKRQGVDEEEVRRVVKKVS

SEQ ID NO: 433 - protein, 40 aa, Artificial Sequence
  Synthetic
SITVTFNGEEAAAKWVKKMKARNLEVHVEVHNGQWTVTFD

SEQ ID NO: 434 - protein, 43 aa, Artificial Sequence
  Synthetic
QDDEAKEKAKRALDNGDEDKAREALRRAGFSEDEIEKIIRKLL

SEQ ID NO: 435 - protein, 40 aa, Artificial Sequence
  Synthetic
TTEIEFPSRTQAEEARKEYESKGYTVTITKVGTRWRVRVG

SEQ ID NO: 436 - protein, 43 aa, Artificial Sequence
  Synthetic
PTEEAQRRAEKAIREGNEDKAREILERAGLSTKEAEEIVRKLK

SEQ ID NO: 437 - protein, 43 aa, Artificial Sequence
  Synthetic
DEKVKKLVKRLIDNGVDDEEIKDRLEKQGVDPREVEKVIQEIR

SEQ ID NO: 438 - protein, 43 aa, Artificial Sequence
  Synthetic
LDEVKELVKRLLDQGIDEDQVVKILRRQGIDPREVEKAVKDVS

SEQ ID NO: 439 - protein, 43 aa, Artificial Sequence
  Synthetic
DSEDLKRKVEEVVRQGDDDRAKELLRRAGVSEEEIQKIIRRIK

SEQ ID NO: 440 - protein, 40 aa, Artificial Sequence
  Synthetic
KTQYEYDTKEEAQKAYEKFKKQGIPVTITQKNGKWFVQVE

SEQ ID NO: 441 - protein, 43 aa, Artificial Sequence
  Synthetic
NKEVEDIVRDLKRKGVSDEEIVEQLKRRGIDEKEVREIVERLK

SEQ ID NO: 442 - protein, 43 aa, Artificial Sequence
  Synthetic
PQDDKEIQRLAKELGVSEDTAREALKQAGGDEEKARQYVQKKL

SEQ ID NO: 443 - protein, 40 aa, Artificial Sequence
  Synthetic
RVTYTFNGDEQAKKHMEKLKRKNLRFEARVENGQWHITVD

SEQ ID NO: 444 - protein, 43 aa, Artificial Sequence
  Synthetic
VQEELKRRVRDVVRNGDPDRARELLQRAGIDDREVEKIIRRIM

SEQ ID NO: 445 - protein, 40 aa, Artificial Sequence
  Synthetic
TTTFEVTDEREARKLEEWARRQGLRVTVTTYGTRIRVDID

SEQ ID NO: 446 - protein, 43 aa, Artificial Sequence
  Synthetic
ATVHIGNVTYHFNNPEEAVKFALRMAKELGRKIEFHGNTIHIQ

SEQ ID NO: 447 - protein, 43 aa, Artificial Sequence
  Synthetic
SEDERLAQELAEEFNLSPEEAKQLVKKAGGNEEKARRLAKQLK

SEQ ID NO: 448 - protein, 43 aa, Artificial Sequence
  Synthetic
TEEEKRVREIARKLGFSDEQADRAYKRANGNEDLARRILEEEA

SEQ ID NO: 449 - protein, 43 aa, Artificial Sequence
  Synthetic
TEEVRRKVKRLLENGVSDDQIKDKLKKEGVDEDEVRRVIEELK

SEQ ID NO: 450 - protein, 43 aa, Artificial Sequence
  Synthetic
VTVHIQGMTYTFSSPEQVYKFAKKMAESLGLKLEIHGNTIHVE

SEQ ID NO: 451 - protein, 43 aa, Artificial Sequence
  Synthetic
SEEVERLVRELKKHNVDDEQIREILQRRGIDDREVEEALRKLK

SEQ ID NO: 452 - protein, 43 aa, Artificial Sequence
  Synthetic
LEEVEKIVKKLADHNVDRRQIREYLQRRGIDERAIEEALRKLG

SEQ ID NO: 453 - protein, 43 aa, Artificial Sequence
  Synthetic
DEKDKKIKEVAKLLGVDDRQVREIARRLGLSDDQLVEWARKHS

SEQ ID NO: 454 - protein, 43 aa, Artificial Sequence
  Synthetic
PEEEKKIDEAAKLLNLDREQVKEIARRLNVSVDQLLEYVRRKS

SEQ ID NO: 455 - protein, 43 aa, Artificial Sequence
  Synthetic
PQDDLKEEARQALENGDKDRAREALRKAGASDKEIEEFIKKYG

SEQ ID NO: 456 - protein, 43 aa, Artificial Sequence
  Synthetic
LEDAARIAQKLRKNGYSDEQIKEVLKRLGISDDQAEQALREAQ

SEQ ID NO: 457 - protein, 43 aa, Artificial Sequence
  Synthetic
ATVKVNNYTYHFSNPEEAEKFAKRVAKELGLELRVKDGTFRIE

SEQ ID NO: 458 - protein, 43 aa, Artificial Sequence
  Synthetic
TEDEARRLIEEALRNGNEDLAKELAKRANVSPDEWKELRKKAF

SEQ ID NO: 459 - protein, 43 aa, Artificial Sequence
  Synthetic
TKVTVGNLTYHLDLSPEQAAKWAKKKYPNADVTVKNGTVTVHH

SEQ ID NO: 460 - protein, 43 aa, Artificial Sequence
  Synthetic
VTVHVDGVEYDFDNPEEALKFAKKVAEDKNGTYEVHGNQIRVT

SEQ ID NO: 461 - protein, 43 aa, Artificial Sequence
  Synthetic
EPEEAKKIIEELLRRGDPESAKKEARRLGISEKTVEELLRRIT

SEQ ID NO: 462 - protein, 43 aa, Artificial Sequence
  Synthetic
LTVQLGNLEWHFDNPEQALKMAEELAKRYQLKVEIDNGTLKFK

SEQ ID NO: 463 - protein, 43 aa, Artificial Sequence
  Synthetic
TTVEVNGVQYHFPNPEEAYKWAVEMAKKLNLRLEIHGNTIHVE

SEQ ID NO: 464 - protein, 43 aa, Artificial Sequence
  Synthetic
DEEELRKLEEDAKRNKDDDLLRRVLKRLGFSDEEVEDIIRRLK

SEQ ID NO: 465 - protein, 43 aa, Artificial Sequence
  Synthetic
MTVEINGVQYTFPNPEEAVKFALKMAKDLGLEVQFHGNKIRVE

SEQ ID NO: 466 - protein, 40 aa, Artificial Sequence
  Synthetic
KIQVTFDGEELARRFAKWAADANLPFEVHVHNGQYTVTIK

SEQ ID NO: 467 - protein, 43 aa, Artificial Sequence
  Synthetic
LTVHVGDLTYHFENPQQAKKFAEEMAKKLNLTIEIRGNEIHVE

SEQ ID NO: 468 - protein, 43 aa, Artificial Sequence
  Synthetic
PPDDERKKAEKAARSGNEEKAREILERLGYSEDEARELAKRLR

SEQ ID NO: 469 - protein, 43 aa, Artificial Sequence
  Synthetic
PDEVKKIVEELQRRGVSDDEIREILKRQGVDDREVEEVIRKLR

SEQ ID NO: 470 - protein, 43 aa, Artificial Sequence
  Synthetic
QPEEAKREAEKAWREGNKTKAEQILRKAGFSSEEAERILRKLG

SEQ ID NO: 471 - protein, 43 aa, Artificial Sequence
  Synthetic
DPRLQKQVKDLYKQGISKDQIREILKRRGVDDRQIDEALRALS

SEQ ID NO: 472 - protein, 40 aa, Artificial Sequence
  Synthetic
TEEYTYTDKEKADRAAKEWANRGYTVTVTQDGPTYRVRVG

SEQ ID NO: 473 - protein, 43 aa, Artificial Sequence
  Synthetic
TTVNVNGKEIRFDTTDEAKKYAKKIAEKYNLTVHVEGNTITVK

SEQ ID NO: 474 - protein, 40 aa, Artificial Sequence
  Synthetic
SVTYTFDGEEKAKEFAKMMKKRNLRVRVEQKNGKFEVHVD

SEQ ID NO: 475 - protein, 43 aa, Artificial Sequence
  Synthetic
SKQELEEKAKEAAKRGDREKARELLERAGLSTQEAKEWIKKFE

SEQ ID NO: 476 - protein, 43 aa, Artificial Sequence
  Synthetic
DEDAERHVEKLVKNGVDDRQIEEILRRLGYSDEEVKRILRKVK

SEQ ID NO: 477 - protein, 40 aa, Artificial Sequence
  Synthetic
DLHLTVNGPEQAKKIVKWAKKQNLEVHVEQKGDQYVITIR

SEQ ID NO: 478 - protein, 40 aa, Artificial Sequence
  Synthetic
AITVTVTGEEQMKKAIKHLRAHNLKVEVQRHGDQFIITAK

SEQ ID NO: 479 - protein, 43 aa, Artificial Sequence
  Synthetic
DDRLAKKVKKLLDNGVSDEEVKEILKRDGVSEEQVQKLIRKVK

SEQ ID NO: 480 - protein, 40 aa, Artificial Sequence
  Synthetic
TIEETYTDKRAAETAAREWAKRGYQVEIRRDGTTWKVHVK

SEQ ID NO: 481 - protein, 43 aa, Artificial Sequence
  Synthetic
DERVEKIVEELLRRGVSPEEVEKILKRQGVDPKEVEDALKRVL

SEQ ID NO: 482 - protein, 43 aa, Artificial Sequence
  Synthetic
SEEVEKHVKELKKRGVDPEQVKEILKRLGVDPREVEHLVRKVF

SEQ ID NO: 483 - protein, 43 aa, Artificial Sequence
  Synthetic
TTVDVQGVKYTFDNPEQAEKFAREMAKKLGLQLEIHGEHWRVE

SEQ ID NO: 484 - protein, 43 aa, Artificial Sequence
  Synthetic
LKEDVKKEVKKVLKNGNEDKARELLKRAGVSDEEVEKIIRRLK

SEQ ID NO: 485 - protein, 40 aa, Artificial Sequence
  Synthetic
EETYTFDDKKQAQKFAEELQKQGYDVQVRKKNGKYHVHVK

SEQ ID NO: 486 - protein, 43 aa, Artificial Sequence
  Synthetic
PKSELEKRAKEALKNGNKELAKRLLEKAGVDPDQAEEFIRKFE

SEQ ID NO: 487 - protein, 43 aa, Artificial Sequence
  Synthetic
PDELKKQARELARRGVDVRQIEEYLKRQGVDPKVIKEVKEEIS

SEQ ID NO: 488 - protein, 43 aa, Artificial Sequence
  Synthetic
DKRVEDIIRELKKQGISDEEVKRILKRRGVDDKEVEEAVRRVT

SEQ ID NO: 489 - protein, 43 aa, Artificial Sequence
  Synthetic
PDELVKHVEELLRRGVSEEEVRRILKRQGVSPEQVDKVIRKAK

SEQ ID NO: 490 - protein, 43 aa, Artificial Sequence
  Synthetic
DDEAKKQVERLLRNGVSDEEIKRILKRQGIDERQVEKLIREVK

SEQ ID NO: 491 - protein, 43 aa, Artificial Sequence
  Synthetic
DDEVKEIVRRLLESGVSDEQVVEYLKRQGIDEEKVRRIVKRVK

SEQ ID NO: 492 - protein, 43 aa, Artificial Sequence
  Synthetic
DEKVDRLFEKLKRNGVSDEEVLRILRRLGIDEKAVREVERKIS

SEQ ID NO: 493 - protein, 43 aa, Artificial Sequence
  Synthetic
DEELKKIIEELLRRGVSDEQIKRHVKRRGADPDEVDKILKEIK

SEQ ID NO: 494 - protein, 43 aa, Artificial Sequence
  Synthetic
TEDVERIAEELKRRGVDPHQVAEILRKLGVSEEEVREVLKKLS

SEQ ID NO: 495 - protein, 43 aa, Artificial Sequence
  Synthetic
DEDVKRLVKELQRRGVSDEEVEKILQRQGVDPREVRKVLRELS

SEQ ID NO: 496 - protein, 43 aa, Artificial Sequence
  Synthetic
SKEKAKREAQKAIKNGDEDLAKEILKRAGFSPEEAEKVVRKLK

SEQ ID NO: 497 - protein, 40 aa, Artificial Sequence
  Synthetic
DIHIQVHGEEDMRRVLKWAKDQNLEAHYKVEGNHVIIRIS

SEQ ID NO: 498 - protein, 43 aa, Artificial Sequence
  Synthetic
PKEVEDIVERLIRNGVDERQIEEYLKRRGVDEKEVRDVIKKLS

SEQ ID NO: 499 - protein, 43 aa, Artificial Sequence
  Synthetic
SEKDKIVKKLARELNVSEEIVRRALERANGDEDKVRELVKRIF

SEQ ID NO: 500 - protein, 43 aa, Artificial Sequence
  Synthetic
TKVTINGVEYTFDNPEQAEKFAKRMAKELNLELRLKDGTFHIE

SEQ ID NO: 501 - protein, 43 aa, Artificial Sequence
  Synthetic
DEEKVKRLREEAKRKNDEELLRKVLKRQGYSDEQVDKIVKKIL

SEQ ID NO: 502 - protein, 43 aa, Artificial Sequence
  Synthetic
TTVTVNGETYKYDNPEAAAKWAKKLAKKANLQVHVDGNTITVT

SEQ ID NO: 503 - protein, 40 aa, Artificial Sequence
  Synthetic
TVTITTTDEDEARKIAEEWRNRGYDVTVEKRGTTLRIEVR

SEQ ID NO: 504 - protein, 43 aa, Artificial Sequence
  Synthetic
SDEAKKIAEKLWKKGASKEEIRKVLENLGVSTDEANKILKELE

SEQ ID NO: 505 - protein, 43 aa, Artificial Sequence
  Synthetic
NDEEKEKEIRKAAKEGNEEKARRLAKKLGISEDRAEKIIREAL

SEQ ID NO: 506 - protein, 40 aa, Artificial Sequence [sequence omitted]

SEQ ID NO: 507 - protein, 43 aa, Artificial Sequence
  Synthetic
DEKAEKIVRDLKRRGVSEEQVKEALKKYGIDPRQVEEIIKKVS

SEQ ID NO: 508 - protein, 43 aa, Artificial Sequence
  Synthetic
TEDLKELAKELKKRGVSPDEIKKILKKAGASDDEAEQAVRDVF

SEQ ID NO: 509 - protein, 43 aa, Artificial Sequence
  Synthetic
PEKLERIARTLAKNGVSSEEIKRILKKLGASDDTAEELARRAG

SEQ ID NO: 510 - protein, 40 aa, Artificial Sequence
  Synthetic
EIQYETHGEEQAKKLAEELKRRNLEVHIEIHNGKYILRVK

SEQ ID NO: 511 - protein, 43 aa, Artificial Sequence
  Synthetic
DEEVEKIWRKLQREGVDEEQVKDILKKQGVSDEQIKKVKKRVS

SEQ ID NO: 512 - protein, 43 aa, Artificial Sequence
  Synthetic
DEEVKKIWEELERRGVSEEEIEKILKRQGVDPREIEKLKQQRR

SEQ ID NO: 513 - protein, 43 aa, Artificial Sequence
  Synthetic
ATVHVQGVTYHFETLEQAQRFAKKVAEKLGLRVEIHGNEIHVK

SEQ ID NO: 514 - protein, 40 aa, Artificial Sequence
  Synthetic
SITFRVEGEELARRIEEWAKRANYSAELRVENGQWIIHVD

SEQ ID NO: 515 - protein, 43 aa, Artificial Sequence
  Synthetic
DEEVEKRVEKLLRNGVDERQIREILKRLGVSDEEVDKLIKKVR

SEQ ID NO: 516 - protein, 43 aa, Artificial Sequence
  Synthetic
DPKVERIIKRLKRNGVSKDEIKEILKKQGVDDRQIEDVLKKVL

SEQ ID NO: 517 - protein, 43 aa, Artificial Sequence
  Synthetic
TEVHVGNLTYHFNNPEEALKFAKRMAKELNLQIHIHGDDIKVE

SEQ ID NO: 518 - protein, 43 aa, Artificial Sequence
  Synthetic
PEKLKELIKQLIKDGYSPQEAADILRKRGATEDELQQALKEVE

SEQ ID NO: 519 - protein, 40 aa, Artificial Sequence
  Synthetic
RTTITVTNEEDARRVAEEWKRRGYTVEVHIHGTTVEVRVE

SEQ ID NO: 520 - protein, 43 aa, Artificial Sequence
  Synthetic
DERVERIIRELKRKGVDPRQIIEILRRQGYSPDEVEKLLQEVS

SEQ ID NO: 521 - protein, 43 aa, Artificial Sequence
  Synthetic
VQVHIGNYTYHFDTLEEALKFARKIAKELGLEVRLHGNTLKVE

SEQ ID NO: 522 - protein, 43 aa, Artificial Sequence
  Synthetic
TDELVKEVRRLLRNGVDERQVRERLKRQGVSDEEVERIIRKAS

SEQ ID NO: 523 - protein, 40 aa, Artificial Sequence
  Synthetic
RVTMTVHGEEQARRIEEMLRRRNLEFKVEAHGDKFVITVD

SEQ ID NO: 524 - protein, 43 aa, Artificial Sequence
  Synthetic
SPEKWKEIADRLFKNGNKEKAKRALQKAGLSPDQAEEYLKKLE

SEQ ID NO: 525 - protein, 43 aa, Artificial Sequence
  Synthetic
YTVHVNGMEYHFDKPEQAKKFALRMAKEQNLEIRFHGETIRVE

SEQ ID NO: 526 - protein, 43 aa, Artificial Sequence
  Synthetic
DKEAEDLFEELKRKGYSTEQILRIARRRGDERLVRIVERILRS

SEQ ID NO: 527 - protein, 43 aa, Artificial Sequence
  Synthetic
ATVHVGNVTYHFDNPEKAKRFAKEIAEKLNLRLEVHGDTWRVE

SEQ ID NO: 528 - protein, 43 aa, Artificial Sequence
  Synthetic
QPEEWEKEAKNALKKGDRDRARDALRQAGYSDEEAERIIRKFE

SEQ ID NO: 529 - protein, 43 aa, Artificial Sequence
  Synthetic
TSEDLRKKAKKAFQDGNEELARRIARKAGLSEEQIDKLLEEAK

SEQ ID NO: 530 - protein, 40 aa, Artificial Sequence
  Synthetic
EETYTVHGEEQAKRLWKYLANRNLDVKVEQHNGDIIITAK

SEQ ID NO: 531 - protein, 43 aa, Artificial Sequence
  Synthetic
PEEVERQVRDLYRRGVDKDQIREYLERQGVDPREVKEALDRVI

SEQ ID NO: 532 - protein, 43 aa, Artificial Sequence
  Synthetic
MQVHVNGVTYDFSSPEQALEFAKRVAEKLNLRVELHNGRIEVE

SEQ ID NO: 533 - protein, 43 aa, Artificial Sequence
  Synthetic
DEEQEKKVERLLRNGYSDEQVKDILRKQGYDPREVEKIIRKLK

SEQ ID NO: 534 - protein, 43 aa, Artificial Sequence
  Synthetic
TTVHVQGVTYHFSSPEEAEKWAKRMAKELNLKIEMHGDTWRVE

SEQ ID NO: 535 - protein, 43 aa, Artificial Sequence
  Synthetic
EEEIARKIERLKRQGVSEEELKDILRKQGIDPRQVERVLRKLG

SEQ ID NO: 536 - protein, 43 aa, Artificial Sequence
  Synthetic
NPRAQRLAEEAKKIGLSPDEIREYLRRAGASEDEIEDALKWLW

SEQ ID NO: 537 - protein, 43 aa, Artificial Sequence
  Synthetic
DEKVRKIVEELLRRGVSEDQIREILKRAGVSDEEIEKVLKELS

SEQ ID NO: 538 - protein, 43 aa, Artificial Sequence
  Synthetic
DDRIKEIIERLLRNGVSDKEIKDIVRKYGVSEEEVDRILKRLK

SEQ ID NO: 539 - protein, 43 aa, Artificial Sequence
  Synthetic
DERIKRRLKELYKNGVDKRQIEKIARELGVDEEEIKQILKELD

SEQ ID NO: 540 - protein, 43 aa, Artificial Sequence
  Synthetic
TEEVKKIVEELKRRGVSKEEISRILKRRGVSDEEIKEARRAIG

SEQ ID NO: 541 - protein, 43 aa, Artificial Sequence
  Synthetic
PDDLEQYARELLKKGVDPDEIKEILKKAGVNPKEAEEIYQKIA

SEQ ID NO: 542 - protein, 43 aa, Artificial Sequence
  Synthetic
PDEVRKIVERLLRNNVSDEQIKEILKRRGVDPREVRDAIEWAR

SEQ ID NO: 543 - protein, 43 aa, Artificial Sequence
  Synthetic
SSEKLQELAKEALKNGDEEKARRLLQKAGYSPEWAERFIQKVK

SEQ ID NO: 544 - protein, 43 aa, Artificial Sequence
  Synthetic
KETEKWIKLFAKLAGLSPEQARQWAKKQNLTEDQLAEVAKRLK

SEQ ID NO: 545 - protein, 43 aa, Artificial Sequence
  Synthetic
DERLEKIVERLLRNGVSKEEVVEYLRRQGVDPRQVEKVVKKVG

SEQ ID NO: 546 - protein, 43 aa, Artificial Sequence
  Synthetic
PEDAERAARELWKNGVTEDEIRKFLEKAGVSPEEARRILEELR

SEQ ID NO: 547 - protein, 40 aa, Artificial Sequence
  Synthetic
QETWEVHGEEQLEKMIKMLKKRNLTVKVQVHNGKIIVTAE

SEQ ID NO: 548 - protein, 40 aa, Artificial Sequence [sequence omitted]

SEQ ID NO: 549 - protein, 43 aa, Artificial Sequence
  Synthetic
PDEVVRIIRELQRRGVSDEEIEKILRRNNVDEKQIKDAKKKVQ

SEQ ID NO: 550 - protein, 43 aa, Artificial Sequence
  Synthetic
PDDARKLAEKLKKNGESDESIERALRKAGVDEEIIRRLLKLLR

SEQ ID NO: 551 - protein, 43 aa, Artificial Sequence
  Synthetic
PKEVQDIVKELLRRGVDPDEVKKILKKQGVSDEEVDKAVKQVS

SEQ ID NO: 552 - protein, 43 aa, Artificial Sequence
  Synthetic
ATVHVGNYTYHFDTLEQAKRFVKRIVKELNLTVEVHGDTWKVE

SEQ ID NO: 553 - protein, 43 aa, Artificial Sequence
  Synthetic
LDEYRKEVKKLLDNGVNPEQVKEWLKRQGIDPRQVDEIVKQVK

SEQ ID NO: 554 - protein, 43 aa, Artificial Sequence
  Synthetic
LEKAKRLFEKLKKEGYSEDQIYEIAQRNNDEELVRFVKRVKDS

SEQ ID NO: 555 - protein, 43 aa, Artificial Sequence
  Synthetic
VTVDVNGVKYTFDEPEQAKKFAKEMAEKLNLRVEIHGNTIRVE

SEQ ID NO: 556 - protein, 40 aa, Artificial Sequence
  Synthetic
EIHFTNDGEEQMRRVLEWAKRANLNVRVEIHNGKIVITVE

SEQ ID NO: 557 - protein, 43 aa, Artificial Sequence
  Synthetic
PDEVRKIIRRLQRNGVSDEEVKKILQRNGWSDEEIERVIREVQ

SEQ ID NO: 558 - protein, 43 aa, Artificial Sequence
  Synthetic
DEEAEKLYRELKRRGYDTEQIVKIARRRNDEKLYKFVKKQLDS

SEQ ID NO: 559 - protein, 43 aa, Artificial Sequence
  Synthetic
DEELKKHVKKLLRNGVDDRQIRDILRRLGVSPEEVERLQREAR

SEQ ID NO: 560 - protein, 43 aa, Artificial Sequence
  Synthetic
NEEVQKIVKELKRRGVSPEQIKKILRDNGVDPRVVDKAVKQAS

SEQ ID NO: 561 - protein, 43 aa, Artificial Sequence
  Synthetic
DEEVERIVRELKKRGISKDQIVEILKKNGFDEKEVREIVEKVA

SEQ ID NO: 562 - protein, 43 aa, Artificial Sequence
  Synthetic
DERLERLVERLQRKGVNDDQIREILRRQGVSEEQVKKIIKRVK

SEQ ID NO: 563 - protein, 43 aa, Artificial Sequence
  Synthetic
PEEVEKAWRELKKQGLSDEQIKRILERRGVDPREIEEVERKVK

SEQ ID NO: 564 - protein, 43 aa, Artificial Sequence
  Synthetic
SEEVKKLVERLLRQGWSEDEIREILRRQGVDPRQVEQAIRDVS

SEQ ID NO: 565 - protein, 43 aa, Artificial Sequence
  Synthetic
SEEVEKLVRELIRKGVDPRQVKEILRRRGVDEREIQKVIREVV

SEQ ID NO: 566 - protein, 43 aa, Artificial Sequence
  Synthetic
SDEVTKIVRELLRRGYNDEQIRKILQRQGVSDEEVQKAIERAK

SEQ ID NO: 567 - protein, 40 aa, Artificial Sequence
  Synthetic
SITLHMDGEEQMRKAVKWAKDQNLRFEVQVHNGQWVLTFD

SEQ ID NO: 568 - protein, 43 aa, Artificial Sequence
  Synthetic
PEEVEKIVRELQKNGVSDDEIREILKRRGVDPRIVDKVIRDIN

SEQ ID NO: 569 - protein, 40 aa, Artificial Sequence
  Synthetic
SITFHMNGEEQMKAVVEWARRANLEVHVEVRNGQFIIQVD

SEQ ID NO: 570 - protein, 43 aa, Artificial Sequence
  Synthetic
NEEQLIEEAAKALKNNDEDKLREIAKRLNVDEEQLKELIRRYE

SEQ ID NO: 571 - protein, 43 aa, Artificial Sequence
  Synthetic
TPELKKIAEELRRRGVSADQIEKVLRKLGVSEQEAKEVANWAR

SEQ ID NO: 572 - protein, 43 aa, Artificial Sequence
  Synthetic
TEVHVQGVTYKFDEPEQAKKFAERVAKELGLQIHIDGNQIHVE

SEQ ID NO: 573 - protein, 43 aa, Artificial Sequence
  Synthetic
TTVEVQGVQYHFETPEQAKKFALEVAKKLGLRIEFHGDTIHIE

SEQ ID NO: 574 - protein, 43 aa, Artificial Sequence
  Synthetic
DEEEKKIQIIAEYLGVSEEEAEEFLKRDPDRAKKIVDKWRRES

SEQ ID NO: 575 - protein, 43 aa, Artificial Sequence
  Synthetic
KTVTVNGVEYRFDNPEEVEKFVKRIAKELNLTVQWHGDHVRVE

SEQ ID NO: 576 - protein, 43 aa, Artificial Sequence
  Synthetic
TTVHVGNVTYHFDNPEEADKFARRMAKEQNLEIRWDGNTIHVE

SEQ ID NO: 577 - protein, 43 aa, Artificial Sequence
  Synthetic
PEEAVKQVRKLLRNGVDRRQVAEYLKKQGFSDEEVEKVVRKAD

SEQ ID NO: 578 - protein, 43 aa, Artificial Sequence
  Synthetic
GEHVERVIKKLLRDGYSDDQIKEILKRQGVDPREVDEVVKKVK

SEQ ID NO: 579 - protein, 43 aa, Artificial Sequence
  Synthetic
DKEEELIKEVARLLGVDEEQVKQWLREQNLSAEEVVKKLRRDS

SEQ ID NO: 580 - protein, 43 aa, Artificial Sequence
  Synthetic
DEEIEKKVKELKKNGVDKEQVEEWLRRQNVDEREVKKILDKLF

SEQ ID NO: 581 - protein, 43 aa, Artificial Sequence
  Synthetic
DEDKVKHEVKKVLENGDEERAEKILRRAGLSDEQVKKVLRELL

SEQ ID NO: 582 - protein, 43 aa, Artificial Sequence
  Synthetic
DEEVEKHVRELVKRGVDREQIKEVLKRKGVSDEEVERLIRRAT

SEQ ID NO: 583 - protein, 43 aa, Artificial Sequence
  Synthetic
PEELEKQVEKLLRNGVSEDEIRKYLQDQGVDDRQVEEIIRRVK

SEQ ID NO: 584 - protein, 43 aa, Artificial Sequence
  Synthetic
SDDIVRDVQRLLREGVSEEQIRRILQRKGVSDEEVKHVIRKAK

SEQ ID NO: 585 - protein, 43 aa, Artificial Sequence
  Synthetic
DQEELKRRVEEVVRNGDEERAKKLLKQVGLDDKQVEEIIRKLR

SEQ ID NO: 586 - protein, 43 aa, Artificial Sequence
  Synthetic
TKEEQQKVVRELAKSGNTDEAERYAREAGLSEDEIKRLIKEAG

SEQ ID NO: 587 - protein, 43 aa, Artificial Sequence
  Synthetic
PSDAEEIAKKLYKNGKSTEQIKKELKKLGVSEEEARKIEKKLL

SEQ ID NO: 588 - protein, 43 aa, Artificial Sequence
  Synthetic
DEKIEKLIRELKRRGVSDDQIRKIVKDQGADEEEVDRLIKKIK

SEQ ID NO: 589 - protein, 43 aa, Artificial Sequence
  Synthetic
SEEVVRIIRELKRRGVDPREIREILQRQGFSDEEIDKAEKIVG

SEQ ID NO: 590 - protein, 43 aa, Artificial Sequence
  Synthetic
DPRELKKRVRDVVRNGDEDRARKLLQRAGLSDEQVERIIKRIL

SEQ ID NO: 591 - protein, 40 aa, Artificial Sequence
  Synthetic
QITYHVTGEEAARKIEKMLRARNLEVEIHVDGDRYVLHAK

SEQ ID NO: 592 - protein, 43 aa, Artificial Sequence
  Synthetic
KEEVVRIVRELERRGYSDEQIKRILKRQGVSDEEIDQAEKIVK

SEQ ID NO: 593 - protein, 43 aa, Artificial Sequence
  Synthetic
DERITRIIEELAKRGYSDEQIRKILKKQGVSDEEIEKALKKVK

SEQ ID NO: 594 - protein, 43 aa, Artificial Sequence
  Synthetic
TTVHMGNITYHFSSPEQAYKFAVQMAKQLGAQMHVEGNTIRVE

SEQ ID NO: 595 - protein, 43 aa, Artificial Sequence
  Synthetic
DEEVKEIAKRLRDQGVDEEQIKDYLRRAGVSEEQIKKVEKYIS

SEQ ID NO: 596 - protein, 43 aa, Artificial Sequence
  Synthetic
TTDELKKKAEEAAKNGNRDKAEELLRRAGLSEEEVERILRKIS

SEQ ID NO: 597 - protein, 43 aa, Artificial Sequence
  Synthetic
RDDAKKAAQYAREQGLTEEQLERWLRKQNVSEEEIKEARKVFS

SEQ ID NO: 598 - protein, 43 aa, Artificial Sequence
  Synthetic
TTVEVNGIKYDFDNPEQAEKFAKEMAKKLGLRVELHGNTFKVE

SEQ ID NO: 599 - protein, 43 aa, Artificial Sequence
  Synthetic
IEDIERHARDLQRQGVSADEVAEILKRKGVDPDIVEKVVRKLK

SEQ ID NO: 600 - protein, 43 aa, Artificial Sequence
  Synthetic
PEDVEKWVERLKKNNVDKRQVEEILKRLGFSEEEVKEALEKVW

SEQ ID NO: 601 - protein, 43 aa, Artificial Sequence
  Synthetic
AEVHVDGVTYQFSNPEQAVKFARKIAKELGLKVEVHGETVHVK

SEQ ID NO: 602 - protein, 43 aa, Artificial Sequence
  Synthetic
GTVQFNGYEYHFDNPEQALKFAQEVAKRLNGRLEMHGNTWKIK

SEQ ID NO: 603 - protein, 40 aa, Artificial Sequence
  Synthetic
TLRFTTTDETTAREIAERFRNKGLDVTVRKHGTTYEVEVR

SEQ ID NO: 604 - protein, 43 aa, Artificial Sequence
  Synthetic
LEEVEEVVKKLLENNVSDEEIERILRRLGVDPEQVRKAIEKVK

SEQ ID NO: 605 - protein, 43 aa, Artificial Sequence
  Synthetic
PEEVVKKIEELKRRGYSDEEIKEILKRQGIDEKEVEEALKALR

SEQ ID NO: 606 - protein, 43 aa, Artificial Sequence
  Synthetic
SDEEIKRRIRKLVQNGNEDKARELARRAGLSEDTIEQLRKEAE

SEQ ID NO: 607 - protein, 43 aa, Artificial Sequence
  Synthetic
DEKLERRVEELLRRGVSEEEIKEILQRLGVSDEEVEEIIRRAK

SEQ ID NO: 608 - protein, 40 aa, Artificial Sequence
  Synthetic
SLTLTVRGEEAVRRWYKWAQAHNLEVEVETHGDEYVLHIK

SEQ ID NO: 609 - protein, 43 aa, Artificial Sequence
  Synthetic
TEEDELLKEAVREANGDKDKVEEWLRRLGVDERQVQKLVRKYG

SEQ ID NO: 610 - protein, 40 aa, Artificial Sequence
  Synthetic
SFEIEVHGEEQAKKVLKWAKAQNLEAHIHVHGDRIIIKID

SEQ ID NO: 611 - protein, 43 aa, Artificial Sequence
  Synthetic
LTVTVGNVTWHFNNPEEAYKFAVKMARTYNLQLEFHGDRLHIE

SEQ ID NO: 612 - protein, 43 aa, Artificial Sequence
  Synthetic
NEEVEKIARELYKRGISPDQVADILKKLGVDDEEVKEAKKIVS

SEQ ID NO: 613 - protein, 40 aa, Artificial Sequence
  Synthetic
RLTITTEGPEAAKRIIKMLKDRNLEVHVEIHNGQFIITAE

SEQ ID NO: 614 - protein, 43 aa, Artificial Sequence
  Synthetic
MRVEVNGVEYQFDNPEAAKKFALEMAKKLGLKIEWHGETIKVE

SEQ ID NO: 615 - protein, 43 aa, Artificial Sequence
  Synthetic
RPEQEELKKLAKKLNLDPREAEEAYDKANGNLEEAKKILKKLA

SEQ ID NO: 616 - protein, 40 aa, Artificial Sequence
  Synthetic
TTEFTVTDETEARKWEEWARRQGLTVTITEENGTWRVRVD

SEQ ID NO: 617 - protein, 43 aa, Artificial Sequence
  Synthetic
EPEARKIVEKLINNGLSPEDVKRWAEKNNNPEVKKAAEEYQKR

SEQ ID NO: 618 - protein, 43 aa, Artificial Sequence
  Synthetic
NEKARKIFEELRKRGYSPDEIRKILQKNGFSEDEIEEAERKAL

SEQ ID NO: 619 - protein, 43 aa, Artificial Sequence
  Synthetic
DEKAEKIARRLQKQGVSADEIAEILKRAGVDPREVKKIREKIL

SEQ ID NO: 620 - protein, 43 aa, Artificial Sequence
  Synthetic
TDEARKLAKEALKRGLSPDEVKEYLEKAGVDPEEAEQLARELK

SEQ ID NO: 621 - protein, 43 aa, Artificial Sequence
  Synthetic
VTVDIKGMEYHFDNPEEAKKFAERMAKELGGELKVENGTLKVE

SEQ ID NO: 622 - protein, 43 aa, Artificial Sequence
  Synthetic
LTVDVGNVTYHFNNPEEVYKFAVKVARELGGTVHVHGNRIHVE

SEQ ID NO: 623 - protein, 40 aa, Artificial Sequence
  Synthetic
TYTYTFTDKRAAETAAREWRNRGYDVTVTVKNGTFTVEVR

SEQ ID NO: 624 - protein, 43 aa, Artificial Sequence
  Synthetic
TQEQKKIAAKLALKGITEVHVGDVTLTFKNPDQAKKWAKKVLG

SEQ ID NO: 625 - protein, 43 aa, Artificial Sequence
  Synthetic
VSEELKEQVKEAVRRGDKDKVEELLRKAGVDEEQIKEWQRRAE

SEQ ID NO: 626 - protein, 43 aa, Artificial Sequence
  Synthetic
PKDELRERAKEALKNGDEDTARELAKRAGLTEEDLRRLKKELG

SEQ ID NO: 627 - protein, 43 aa, Artificial Sequence
  Synthetic
SEDIKERVKELLKRGVSPDEIVEILQREGVTPEEAQKAVDEAA

SEQ ID NO: 628 - protein, 43 aa, Artificial Sequence
  Synthetic
DEKVERIVRRLLQNGVSPEQIKDILKKAGIDDRQIEDVLKKLS

SEQ ID NO: 629 - protein, 40 aa, Artificial Sequence
  Synthetic
QITVTFDGEEQARRFYKLMVKRNYDAKIEVHNGKYTVTAK

SEQ ID NO: 630 - protein, 43 aa, Artificial Sequence
  Synthetic
TREEAEKEAQRLVEEGNEDQARELLKRAGFSPQEIEEIIQKVK

SEQ ID NO: 631 - protein, 40 aa, Artificial Sequence
  Synthetic
SVTYTFDGEEAALAFMEEMRRRNLRAEIRVNGDKWEVTVE

SEQ ID NO: 632 - protein, 43 aa, Artificial Sequence
  Synthetic
SDEELKKRIEELVRRGNKDEARKLAENANSDEARKWWEKLEQL

SEQ ID NO: 633 - protein, 43 aa, Artificial Sequence
  Synthetic
TQEDLLREVEKALKNNDEEKVRRLAKRIGVSEEQVEKLVRKFG

SEQ ID NO: 634 - protein, 40 aa, Artificial Sequence
  Synthetic
AITFHVHGEEAMHKVVEWAKRANLEVHYQRHGDKFIITAE

SEQ ID NO: 635 - protein, 43 aa, Artificial Sequence
  Synthetic
KEEVEKDVRRLVKEGVSEEQLKKILKRKGVSDEEVEDIIKKAL

SEQ ID NO: 636 - protein, 43 aa, Artificial Sequence
  Synthetic
PEELQRIVRELQRRGYSDEQIKEILRRQGVDDRQVEEVIRRAK

SEQ ID NO: 637 - protein, 43 aa, Artificial Sequence
  Synthetic
DEEVKKHAEQLLRDGISPDQVEEILKRLGVDPREVEDIVRKLK

SEQ ID NO: 638 - protein, 43 aa, Artificial Sequence
  Synthetic
DEKLVREVEKLKKDGYSEEQLREILKRKGVSDEEVDRIIKQVG

SEQ ID NO: 639 - protein, 43 aa, Artificial Sequence
  Synthetic
SDEEKKVRDQAKRLGVNTEQLLKWARRQGDEDLVRIVERLLRS

SEQ ID NO: 640 - protein, 43 aa, Artificial Sequence
  Synthetic
PEELEKEVEKLLKNGVDQRQLKEWLRRHGVSDEQVDRIVRKVG

SEQ ID NO: 641 - protein, 43 aa, Artificial Sequence
  Synthetic
TEDVKKTAQKLLKKGYSEEEIEKILRKLGVSEEEIKEAKKALY

SEQ ID NO: 642 - protein, 43 aa, Artificial Sequence
  Synthetic
PEEVEKIVRELQKNGVSTDEILEILRRAGVDERAVQEIERRLR

SEQ ID NO: 643 - protein, 43 aa, Artificial Sequence
  Synthetic
LTVHLNGYTYHFSSLEEVLKFIRELARKLNLTMHMEGNTIHVE

SEQ ID NO: 644 - protein, 43 aa, Artificial Sequence
  Synthetic
DEEIEKKVEELLRRGVDPRQVIEYLKRQGVDEEQVRQVVEKLS

SEQ ID NO: 645 - protein, 43 aa, Artificial Sequence
  Synthetic
SREEAKKRVEEILKHGNEEEARRVLKRAGVDPRQVEKIIQELK

SEQ ID NO: 646 - protein, 43 aa, Artificial Sequence
  Synthetic
DKKVKDLIDELHKRGLSDEQIKRALQRAGVDDEQVKKALREWK

SEQ ID NO: 647 - protein, 43 aa, Artificial Sequence
  Synthetic
TQEDIERKAKEAVERGDRDKARKLLQKAGLSPEQAEKFIQKAE

SEQ ID NO: 648 - protein, 40 aa, Artificial Sequence
  Synthetic
AVEYTFDGEEQAKKFLKEMRKQNLNATYTVKNGKYVVRIE

SEQ ID NO: 649 - protein, 43 aa, Artificial Sequence
  Synthetic
DEEERREIEELLRKGVDPEEIVKQLKKKGLNEDDVRKIIKELL

SEQ ID NO: 650 - protein, 43 aa, Artificial Sequence
  Synthetic
TTVHLNGVTYHFSSPEQALKFALKLAKELGRDVEIKNGTIHVE

SEQ ID NO: 651 - protein, 43 aa, Artificial Sequence
  Synthetic
SEEVEDIVRKLLENGVDEEQIKEYLRRQGIDPDDVDKAIKKVK

SEQ ID NO: 652 - protein, 43 aa, Artificial Sequence [sequence omitted]

SEQ ID NO: 653 - protein, 43 aa, Artificial Sequence
  Synthetic
KTVDVNGVTYHFPTPEEAERFAKRMAKELGLRIEFHGDRIRVE

SEQ ID NO: 654 - protein, 43 aa, Artificial Sequence
  Synthetic
DEKAKRIVEKLLRNGVDDEQIKEILKRLGVDDRQVKKIIDEVK

SEQ ID NO: 655 - protein, 43 aa, Artificial Sequence
  Synthetic
TEEIEKLIRRLLENGIDDRQIKKIVKKKGYDERQVEKVLRELK

SEQ ID NO: 656 - protein, 40 aa, Artificial Sequence
  Synthetic
KETWEVHGEEQAKKILKMLRDRNLNVEVQVHNGRWVFHAE

SEQ ID NO: 657 - protein, 43 aa, Artificial Sequence
  Synthetic
ATVTVNGVEYHFNNPEEAKKFAEEVAKKLQLRVELHNGRFHIE

SEQ ID NO: 658 - protein, 43 aa, Artificial Sequence
  Synthetic
VTVHVDGVTYHFPTPEEAEKFARRMAKERNRRLEFHGNTIRVE

SEQ ID NO: 659 - protein, 43 aa, Artificial Sequence
  Synthetic
KKVTINGVEIKFNNPEEAVKFALELAKRLNLRIEFHGDQIKIE

SEQ ID NO: 660 - protein, 43 aa, Artificial Sequence
  Synthetic
EEEVEKIVERLLKNGYSPDQVREILRRQGVDDRQVEEALRRVM

SEQ ID NO: 661 - protein, 43 aa, Artificial Sequence
  Synthetic
NQEEVVKEIVKAQKNGDEDKVERLKRQYNISDEIVKRVKRRLD

SEQ ID NO: 662 - protein, 43 aa, Artificial Sequence
  Synthetic
DERAKRIVDELRKNGVSPDQIAKILKRAGVDDRIVEDIYRKLV

SEQ ID NO: 663 - protein, 43 aa, Artificial Sequence
  Synthetic
YQEELKKQTEEALRRGDSDRVRKLLKRQGLDDRQVQEYIERHL

SEQ ID NO: 664 - protein, 43 aa, Artificial Sequence
  Synthetic
YTVHLNGLTMHFSSLEEAMKFALKLAKKLNLTLHLEGHTVHIE

SEQ ID NO: 665 - protein, 43 aa, Artificial Sequence
  Synthetic
DEDAEKHVKELLKRGVSDEQIEKILKDLGLSDEQVRRVVRRAK

SEQ ID NO: 666 - protein, 43 aa, Artificial Sequence
  Synthetic
KKEAEDLAKELKKNGVSDEEIKQLLQRAGVDEREVQKILRKLK

SEQ ID NO: 667 - protein, 43 aa, Artificial Sequence
  Synthetic
NEEVKRLVERLLRNGVSPDQVTEILRRQGIDPREVRRAVEEVY

SEQ ID NO: 668 - protein, 43 aa, Artificial Sequence
  Synthetic
IEAVKEAQKAVEEGKTYEITVNGITVRVQTQEAAKELEKLIRR

SEQ ID NO: 669 - protein, 43 aa, Artificial Sequence
  Synthetic
DDEHLVRQVRDLQHKYDPKQVREWLKRQGVSDEEIEKIERLVS

SEQ ID NO: 670 - protein, 43 aa, Artificial Sequence
  Synthetic
EPREEEAEKYIKRANGDYDKAQELAKKDGNEEIAEAIKEYKKR

SEQ ID NO: 671 - protein, 43 aa, Artificial Sequence
  Synthetic
TEEIQKRARDLYKSGYDREEVVKILRKQGVSEEQLKEVRRAIS

SEQ ID NO: 672 - protein, 43 aa, Artificial Sequence
  Synthetic
PEELTEIVKKLYRNGVDPRQIEEILKRLGADDREVKRAIDEVS

SEQ ID NO: 673 - protein, 43 aa, Artificial Sequence
  Synthetic
DERDEVLRRVAELLQTDEKQVEELAKKLNLDAKELLEWVQRQS

SEQ ID NO: 674 - protein, 43 aa, Artificial Sequence
  Synthetic
KEDVEKKVEELLRRGVDERQIKEKLKREGVDEREIEEVLRRLK

SEQ ID NO: 675 - protein, 43 aa, Artificial Sequence
  Synthetic
SQEEKELRRLAKEAGVSEDELKKIIEKAGGDSEKAKEILKRIK

SEQ ID NO: 676 - protein, 43 aa, Artificial Sequence
  Synthetic
DERVEKKVRELWERGVDEEELVERLKRQGIDPREVRKIYRELS

SEQ ID NO: 677 - protein, 43 aa, Artificial Sequence
  Synthetic
PEEVKRIVKDLIRRGVDKKQVREILQRRGVDDREIDEALKAAG

SEQ ID NO: 678 - protein, 43 aa, Artificial Sequence
  Synthetic
PEELKKKVHELYKNGVDTEQLKKWLKKQGVSDEQVDKIVRQAK

SEQ ID NO: 679 - protein, 43 aa, Artificial Sequence
  Synthetic
VEELTRVVKELLRRGVDDRQIREILKRLGASDDEVDEVLKKAK

SEQ ID NO: 680 - protein, 43 aa, Artificial Sequence
  Synthetic
QTVHVGNLTYHFDNPEEVVKFALRLAKELNLRVEFHGDTVRVE

SEQ ID NO: 681 - protein, 43 aa, Artificial Sequence
  Synthetic
PEEVEKIVRRLLKNGVDERQVREILRRNGVDEKAVDDVIRRVK

SEQ ID NO: 682 - protein, 43 aa, Artificial Sequence
  Synthetic
KTVEWNGYRVTFDNPEQAKKYAKRMAEELGGTVEFRGDTVQVE

SEQ ID NO: 683 - protein, 43 aa, Artificial Sequence
  Synthetic
VTVHVQGVQYHFNNPEAAKKFAKEMAKKLQLRVEVHGNTIRIE

SEQ ID NO: 684 - protein, 43 aa, Artificial Sequence
  Synthetic
PEELKKKAEELYRRGVSTEQIREWLREAGVTEEIAQEIAKWVA

SEQ ID NO: 685 - protein, 40 aa, Artificial Sequence
  Synthetic
RFTIRVRGEEQMKHWLKILRAQNLDVKVQQHGDEFILHAE

SEQ ID NO: 686 - protein, 43 aa, Artificial Sequence
  Synthetic
ATVHIGNVTYHFSNPKEAEKFAKKMAKKLGMTLTIENGQWKVE

SEQ ID NO: 687 - protein, 43 aa, Artificial Sequence
  Synthetic
RDEVKKIVKDLLDQGVSKDQIREYLQRQGIDEEEVEKAIREVL

SEQ ID NO: 688 - protein, 43 aa, Artificial Sequence
  Synthetic
SEEVERLVRELYKNGVSPEQIKKYLKKQGVSDEEVEEAVRRVI

SEQ ID NO: 689 - protein, 40 aa, Artificial Sequence
  Synthetic
EITIHVEGEEKMRDIYRKLMEQNLEVEIQVHNGQWVLHIK

SEQ ID NO: 690 - protein, 43 aa, Artificial Sequence
  Synthetic
QTVHVNNYTYHFENPEQAVKFALEVARKLGLRVEIHGDTLHVE

SEQ ID NO: 691 - protein, 43 aa, Artificial Sequence
  Synthetic
QTVHVNGLTYHFSSPEEAKRFVKRVVEELGLTYEVHGNTIHIE

SEQ ID NO: 692 - protein, 43 aa, Artificial Sequence
  Synthetic
NRDELEKKAEELARRGNKDKAREVLERAGYSTEEAERILNKIM

SEQ ID NO: 693 - protein, 43 aa, Artificial Sequence
  Synthetic
MTVHIQGVQYHFSNPEEAEKFAKKMAKELGLRIEIHGNTIRVE

SEQ ID NO: 694 - protein, 43 aa, Artificial Sequence
  Synthetic
SKEQAKKEAEQALRDGDPEKAQKILKRAGVSQEEAERILEKIK

SEQ ID NO: 695 - protein, 43 aa, Artificial Sequence [sequence omitted]

SEQ ID NO: 696 - protein, 43 aa, Artificial Sequence
  Synthetic
QTVTVNGVNVTFPNPEQALKYALELAKKLGLRVELHNGTYHVE

SEQ ID NO: 697 - protein, 43 aa, Artificial Sequence
  Synthetic
GTVHIGNTTFQFDNKDEAIKFAKEYAKKLGLEVHVHGPTITVK

SEQ ID NO: 698 - protein, 43 aa, Artificial Sequence
  Synthetic
LEEAAQAALLAYRRGLDQINWGNITITKGSPTFQKLLKIAKKL

SEQ ID NO: 699 - protein, 43 aa, Artificial Sequence
  Synthetic
DEEIRKIVEELLRRGYSEDEIREILKRQGADEREVERVIQEVS

SEQ ID NO: 700 - protein, 43 aa, Artificial Sequence
  Synthetic
DERVEEIVKRLYKQGVDRRQIKEILKRQGVDPDEVDKAVRRAI

SEQ ID NO: 701 - protein, 43 aa, Artificial Sequence
  Synthetic
DKEELKTRAEKAARNGNKEKAEELLRRAGVSDEEIQKFLDKVI

SEQ ID NO: 702 - protein, 40 aa, Artificial Sequence
  Synthetic
TQTQEFDNEEEARKAEKELRKENRRVTVTQENGRWRVTWD

SEQ ID NO: 703 - protein, 43 aa, Artificial Sequence
  Synthetic
TTVHVNGVTYHFDNPEEADKFAKRVAKELNLELRYKDGTYHVE

SEQ ID NO: 704 - protein, 43 aa, Artificial Sequence
  Synthetic
DEDEVAKRLLKAWQNGDEDLVRKIAKEVNISDEQVERLIRKVL

SEQ ID NO: 705 - protein, 40 aa, Artificial Sequence
  Synthetic
RITITVEGEEKARRIAKKLKEQNLEVHVEKKNGRWIITAE

SEQ ID NO: 706 - protein, 40 aa, Artificial Sequence
  Synthetic
RIQITSHGEEQARRIYKWAAKHASSVELHLHGNEWVIEFE

SEQ ID NO: 707 - protein, 43 aa, Artificial Sequence
  Synthetic
AQVHVDGVTYDFDNPEEAEKFAREMAKRKGGTVEVKNDQWHVE

SEQ ID NO: 708 - protein, 43 aa, Artificial Sequence
  Synthetic
LQVHVNGVQYDFSSPEQALRFALEVAKKLNLRVEIHGNTIHVE

SEQ ID NO: 709 - protein, 43 aa, Artificial Sequence
  Synthetic
DEEDRLVEEIAKKYQLDPRQVRKALKRANGDKDRVQEILKKEL

SEQ ID NO: 710 - protein, 43 aa, Artificial Sequence
  Synthetic
DDRVKERVKRLIDNGVDPREVREILKRLGVSDEEVEKILREVI

SEQ ID NO: 711 - protein, 43 aa, Artificial Sequence
  Synthetic
TDDVKKLAKRLARQGLSPDQVVEVLRKQGVSDEELKEAKRVVS

SEQ ID NO: 712 - protein, 43 aa, Artificial Sequence
  Synthetic
PEDVEKTVEELKKRGVSSEEIKRILKRQGVDPREVDEVLRKIW

SEQ ID NO: 713 - protein, 43 aa, Artificial Sequence
  Synthetic
EERLTKIVEELKRRGVDKRQIRKILQRQGVDDRQVEEALRLVG

SEQ ID NO: 714 - protein, 43 aa, Artificial Sequence
  Synthetic
IDEVKKLLKKAIENGVSDDQLKELAKRAGVDDRQVDEIIRKLK

SEQ ID NO: 715 - protein, 43 aa, Artificial Sequence
  Synthetic
SQEELKEKIKRAIRNNDEETARKLAEKAGLSDDDYKQLKKEAL

SEQ ID NO: 716 - protein, 43 aa, Artificial Sequence
  Synthetic
DKEVEDIIRELQRRGVSDDQIKRILQRKGVDDREVEEVLRKVK

SEQ ID NO: 717 - protein, 43 aa, Artificial Sequence
  Synthetic
DEEVEKQVRELVKQGVSEEELTEYVKRLGYSEEQAREVVKRAM

SEQ ID NO: 718 - protein, 40 aa, Artificial Sequence
  Synthetic
SVKYKVKGPEAAKKFLEEMKRRNLRATLHFHGDDIIIEVS

SEQ ID NO: 719 - protein, 40 aa, Artificial Sequence [sequence omitted]

SEQ ID NO: 720 - protein, 43 aa, Artificial Sequence
  Synthetic
ITVHVNGITYHFNNPEEAEKFAKEMAKRLNLRIEVHGNEIHVE

SEQ ID NO: 721 - protein, 43 aa, Artificial Sequence
  Synthetic
MQVTWGNVTVTFSNPEEAKKYAEKVARKLGGQVELHNGQFRIK

SEQ ID NO: 722 - protein, 43 aa, Artificial Sequence
  Synthetic
PEEVERIVKKLLENGVSEEEVRKILQRRGVDDEQVDKVIKRVS

SEQ ID NO: 723 - protein, 43 aa, Artificial Sequence
  Synthetic
SEDAKKVAKELAKKGVSPEEIRKILRKLGVSEEEIDKALKAAF

SEQ ID NO: 724 - protein, 43 aa, Artificial Sequence
  Synthetic
EEDRLREELRQAVENGDKEKAARVLQRQGVSPEKAQKLAEKLV

SEQ ID NO: 725 - protein, 43 aa, Artificial Sequence
  Synthetic
VRIAEWAEWAIKKGKPVTIHYGNVTVQIDTQDAAKYWLQYARN

SEQ ID NO: 726 - protein, 43 aa, Artificial Sequence
  Synthetic
DELEKRVKELVKKLGVSLDQLYEILRRQGNDDLVRAVRRVKQE

SEQ ID NO: 727 - protein, 43 aa, Artificial Sequence
  Synthetic
NEEVKRIVEDLLRRGVDRDQVKKILQRRGVDDREVEKVLRELG

SEQ ID NO: 728 - protein, 40 aa, Artificial Sequence
  Synthetic
TETYTFTDRREAEKFAEKARRKGLTVTYTEDNGTVTVKVE

SEQ ID NO: 729 - protein, 40 aa, Artificial Sequence
  Synthetic
TTTYKYDDKKAAEEAAKEYKKKGLEVHVRQENGTWVVTIK

SEQ ID NO: 730 - protein, 43 aa, Artificial Sequence
  Synthetic
RDDEAKERAWRALQNGDDEELERIARELGISREDAKKLAKKWG

SEQ ID NO: 731 - protein, 43 aa, Artificial Sequence
  Synthetic
SQDELLKKIEEALRRGDRETAEKLARKAGVTLEEARKLIEKLQ

SEQ ID NO: 732 - protein, 43 aa, Artificial Sequence
  Synthetic
TKEVQEIVDKLKRQGISDEQIKRYLKRAGFDDRQVEEAVRRYR

SEQ ID NO: 733 - protein, 43 aa, Artificial Sequence
  Synthetic
DPRLERIAKKLKDDGYDEEQIVEILKRYGVDEEEAKKLAKKVK

SEQ ID NO: 734 - protein, 43 aa, Artificial Sequence
  Synthetic
DERLEKLFRRLKRNGYSPEQIVQIAKRRGLDEDKVRKVVRELG

SEQ ID NO: 735 - protein, 40 aa, Artificial Sequence
  Synthetic
TEKYTYTNQEAAEEAAKKFQKKGYDVQVTQNGDQYTVHVK

SEQ ID NO: 736 - protein, 43 aa, Artificial Sequence
  Synthetic
HTLTVNGETYTFDTPDAAKKWAKEYADKYNLTVEIKNGEIHVK

SEQ ID NO: 737 - protein, 43 aa, Artificial Sequence
  Synthetic
PDDAKKLAKKLLNNGVTPEEVRKILKKAGLSEEQARQIIENAL

SEQ ID NO: 738 - protein, 43 aa, Artificial Sequence
  Synthetic
ITVHVGNYTFHFNNPEEVKKFVARLAKELNREVEVRGNEVHIK

SEQ ID NO: 739 - protein, 43 aa, Artificial Sequence
  Synthetic
AQVHVGNVTYHFSSPEQAYKFAVKMARENNLQMHVHGSQIHVE

SEQ ID NO: 740 - protein, 43 aa, Artificial Sequence
  Synthetic
KKVLINGETYTFPNPEEAYKWAKKQAKKLNLSIKEENGTIHVK

SEQ ID NO: 741 - protein, 43 aa, Artificial Sequence
  Synthetic
QEDIERQVKKAKKDGISKEEAERILRKQGVTEDEAKKALDKVF

SEQ ID NO: 742 - protein, 43 aa, Artificial Sequence
  Synthetic
SEEDELIEEAARLLGTDKEEVKKLVKDLNVDIEEFVEWVRKKS

SEQ ID NO: 743 - protein, 40 aa, Artificial Sequence
  Synthetic
EMTLTFHGEEQMKRAYKWAMDQNLEVHVKIENGEFHLTFK

SEQ ID NO: 744 - protein, 43 aa, Artificial Sequence
  Synthetic
TDEVTERAKELLKRGLSPEDAIRALEKQGVDPEEAKEAVKEAE

SEQ ID NO: 745 - protein, 43 aa, Artificial Sequence
  Synthetic
DDHVRRVVEELLRRGYSDEQVKRIVKRLGIDPRKVDKVLKDIK

SEQ ID NO: 746 - protein, 43 aa, Artificial Sequence
  Synthetic
PDEVKKEVHELLKNGVSEEQIRRRLQRLGLSDEEVERIIREAK

SEQ ID NO: 747 - protein, 43 aa, Artificial Sequence
  Synthetic
PEELERKVRRLQRNGVDKEQVKKYLKRHGVDEREVEKILRKLG

SEQ ID NO: 748 - protein, 43 aa, Artificial Sequence
  Synthetic
DEEELVKRIAKALRNGDEDRVRELLKRYNLDPRRVDRLVKELS

SEQ ID NO: 749 - protein, 43 aa, Artificial Sequence
  Synthetic
VTVHINGVTYHFNNLEEAKEFAKRIAKKLNLKVEVHGNEIHVE

SEQ ID NO: 750 - protein, 43 aa, Artificial Sequence
  Synthetic
ITVHVDGVTFHFNNPEEAEKFVRKIAEKKNLEVQLHNGQIHIE

SEQ ID NO: 751 - protein, 43 aa, Artificial Sequence
  Synthetic
AQVDINGVTYQFDNPEQAEKFAKEMAKKLNLRLELHGNTWKIE

SEQ ID NO: 752 - protein, 43 aa, Artificial Sequence
  Synthetic
PEEEKIIKDLAKRVGVDERQVRKALKEANGDKDRVEEILRRRL

SEQ ID NO: 753 - protein, 43 aa, Artificial Sequence
  Synthetic
EEEIEKIIRDLQRQGLSDDQIREVLRRRGVDERKIQDVQRKVK

SEQ ID NO: 754 - protein, 43 aa, Artificial Sequence
  Synthetic
PTEELQEKAKEAYKKGNKEEAKELLQKAGLSPEQAERFLQKAF

SEQ ID NO: 755 - protein, 43 aa, Artificial Sequence
  Synthetic
PQDAKELIREALERGKSKEQAKELAQRAGLSDEQAERLIREVE

SEQ ID NO: 756 - protein, 40 aa, Artificial Sequence
  Synthetic
EYHITVHGEEQAKKVVEILRRMNLEVHVQQHNGQIIIHAH

SEQ ID NO: 757 - protein, 43 aa, Artificial Sequence
  Synthetic
TTVHVNGVQYHFSSPEQAVKFALKIAKEIGGTVEFHGETIRVE

SEQ ID NO: 758 - protein, 43 aa, Artificial Sequence
  Synthetic
TQRDWERLAKQLYRENNPDKAREALRKAGFSEEEIDKILNKAD

SEQ ID NO: 759 - protein, 43 aa, Artificial Sequence
  Synthetic
PQEELLKELDDALKRGDEDKVKRLVRRIGVSEEEAERLVREFV

SEQ ID NO: 760 - protein, 43 aa, Artificial Sequence
  Synthetic
DEHIERTVRKLLRNGVDDEQVKKILKKQGVDPRQVDEVIKRVK

SEQ ID NO: 761 - protein, 43 aa, Artificial Sequence
  Synthetic
DQEEWERRVEELVRRGDEDQAREVLKKVGYSPEQVDKIVKDLY

SEQ ID NO: 762 - protein, 43 aa, Artificial Sequence
  Synthetic
DEDIKRKIKELLKQGVSPEEVTQILKRQGIDEDEVRKLVKRVS

SEQ ID NO: 763 - protein, 43 aa, Artificial Sequence
  Synthetic
IEEVKKLVKKLQRDGYSDEEVKKALQKYGVDEREVEQAIREVK

SEQ ID NO: 764 - protein, 43 aa, Artificial Sequence
  Synthetic
PEELKKQVKKLLRNGLSEEQVKKILKEQGVSPEEVEKIIRDAR

SEQ ID NO: 765 - protein, 43 aa, Artificial Sequence
  Synthetic
TPEELKKKAQEALKNGDEETAKKLLEKAGYSPDQAEEILKKLK

SEQ ID NO: 766 - protein, 43 aa, Artificial Sequence
  Synthetic
RQEDAKKEAERAIRSGNKDKAKEILQRAGFSPDEAEEIVKRLK

SEQ ID NO: 767 - protein, 43 aa, Artificial Sequence
  Synthetic
ITVHVKGVTYHFNNPEEAVKFAREMAKRLNGTVEFRGNTIHVD

SEQ ID NO: 768 - protein, 43 aa, Artificial Sequence
  Synthetic
DDEVRDKIRRLLENGVDDDQIEKIITRQGFDTDEVRELIKRIK

SEQ ID NO: 769 - protein, 43 aa, Artificial Sequence
  Synthetic
RKEEAVRRALEAIKRGDEKKVQELAKKANISPEELKKLARQVE

SEQ ID NO: 770 - protein, 43 aa, Artificial Sequence
  Synthetic
DERLEKRFRELKRRGYSDEEIKRILKRQGVDPREIEKVERRVK

SEQ ID NO: 771 - protein, 43 aa, Artificial Sequence
  Synthetic
TTEDLKEKAKELAKRGNEEEARRVLQKAGVSEEEIKRVLKEAL

SEQ ID NO: 772 - protein, 43 aa, Artificial Sequence
  Synthetic
IEEVEKHVQRLLENGVNKDQVREILKRRGVDEKQVDDVLKRIG

SEQ ID NO: 773 - protein, 43 aa, Artificial Sequence
  Synthetic
TTVHVKGVEYRFDTPEQAKKFAEKMAKKLNGTVEVHGDTFHVD

SEQ ID NO: 774 - protein, 43 aa, Artificial Sequence
  Synthetic
VEDAEKLARKLLKNGYSPEEIKKILEKAGLSPDQAEEALQRAL

SEQ ID NO: 775 - protein, 43 aa, Artificial Sequence
  Synthetic
GELHVNGKTYHLPSWKAAAKLAKELAKKYNLTVTVRGNQVTVK

SEQ ID NO: 776 - protein, 43 aa, Artificial Sequence
  Synthetic
PKEIEDIIRRLYENGVDPRQIKEHLKRRGVDERQVEDVLRKII

SEQ ID NO: 777 - protein, 43 aa, Artificial Sequence [sequence omitted]

SEQ ID NO: 778 - protein, 43 aa, Artificial Sequence
  Synthetic
EKDAEEIAKRLRDNGVSPEQAEEILKRLGVSEDTAKELAKQVA

SEQ ID NO: 779 - protein, 43 aa, Artificial Sequence
  Synthetic
LEVERLFREALKKANGNTEKAERIARKLGASEEELQEAKRRVL

SEQ ID NO: 780 - protein, 43 aa, Artificial Sequence
  Synthetic
IEDVEKKVEKLLREGYSDEEIVEKLKREGIDEDSVREAIKRVK

SEQ ID NO: 781 - protein, 43 aa, Artificial Sequence
  Synthetic
DEELEKQVRKLLDNGVSEEEVTRILQRHGVSDEEVERLIRRVK

SEQ ID NO: 782 - protein, 43 aa, Artificial Sequence
  Synthetic
ADELRKQVERLYRSGVDEEQIKEILKRQGVSDDQVRRLIREVV

SEQ ID NO: 783 - protein, 43 aa, Artificial Sequence
  Synthetic
DKEELKRQVEKAIKNGDDDRARELLQRAGVSDEQIEKIIKRIK

SEQ ID NO: 784 - protein, 40 aa, Artificial Sequence
  Synthetic
GIDYTVDGEELARKLAKKLKAQNLKVEIKVENGKYIITAK

SEQ ID NO: 785 - protein, 43 aa, Artificial Sequence
  Synthetic
TDDAREIIKKLYKNGASEDELRKAANKLGLSESDVEEIIKELS

SEQ ID NO: 786 - protein, 43 aa, Artificial Sequence
  Synthetic
LEEAKDAVRRAIERGADEKELKEILKRYGVSDEEVDKIVKRLL

SEQ ID NO: 787 - protein, 43 aa, Artificial Sequence
  Synthetic
MTVDVQGIKYTFPNPEQAAKFAKEVAKKLGLEVHVENGQWKVE

SEQ ID NO: 788 - protein, 43 aa, Artificial Sequence
  Synthetic
AEVEVNGVKYTFDNPEEAKKFAERVAKELNLEMRLKDGRWHIE

SEQ ID NO: 789 - protein, 40 aa, Artificial Sequence
  Synthetic
AIRYEVEGEEKAKKLAKHLKNQNLRVRIEVHNGKWIVEAH

SEQ ID NO: 790 - protein, 40 aa, Artificial Sequence
  Synthetic
RIQWTVDGQEQAEKIYKMLAARNLEVHIEVHNGKIVIKAD

SEQ ID NO: 791 - protein, 43 aa, Artificial Sequence
  Synthetic
TTVHVNGVTYHFSSLEQVKEFALKIAKKLNLEIRFHGEEVHIE

SEQ ID NO: 792 - protein, 43 aa, Artificial Sequence
  Synthetic
MEELEKVVEELLRNGVDPHEIRKILKRLGASPEQVDEVIRRVG

SEQ ID NO: 793 - protein, 43 aa, Artificial Sequence
  Synthetic
ESEELKREVEEVVRRGDEDRAKELLKRAGLNDEQVKEFIRRVL

SEQ ID NO: 794 - protein, 43 aa, Artificial Sequence
  Synthetic
PEDAKEEAKKAYKNGASREDIKEYLKKLGVDPDKAEQIAKEVI

SEQ ID NO: 795 - protein, 43 aa, Artificial Sequence
  Synthetic
PQRAEDYARELLERGVDPDEVIKILQKEGISEEEARRAVKKAK

SEQ ID NO: 796 - protein, 43 aa, Artificial Sequence
  Synthetic
DEEVERLVERLLKNGVDSRQIEEILKRRGIDPREVERAIKRVK

SEQ ID NO: 797 - protein, 43 aa, Artificial Sequence
  Synthetic
PPEEARRRVAEALEQGNKELAERLKKKYGISDEEAKKAKENLD

SEQ ID NO: 798 - protein, 43 aa, Artificial Sequence
  Synthetic
NQVHVGNVTYDFDKPEQAEKFAKRIAKELGMRVELHNGQFHVE

SEQ ID NO: 799 - protein, 43 aa, Artificial Sequence
  Synthetic
STVHVNGIKITFPNPQAAQKFAEKVAKELGLTVEVHGNTVKVK

SEQ ID NO: 800 - protein, 43 aa, Artificial Sequence
  Synthetic
EDEVKKKFKKLQDNGVSDEQVKRILKKQGVDPRVIEKVEQELK

SEQ ID NO: 801 - protein, 43 aa, Artificial Sequence
  Synthetic
SEQEKRIQEIARQVGVSPDQVRKVLREANGDEDKVREILKRRL

SEQ ID NO: 802 - protein, 43 aa, Artificial Sequence
  Synthetic
AEEVEKKLKRLLDDGVDPEQVVEIVKRQGIDEEEVRRLLKKLG

SEQ ID NO: 803 - protein, 43 aa, Artificial Sequence
  Synthetic
PDDLEKRARELLKRGKNPDEIREYLRNAGYDQSQAEEALKRAL

SEQ ID NO: 804 - protein, 43 aa, Artificial Sequence
  Synthetic
MEAAKKALKALKHGLKLKITIGNTTIKVTSQDEAKKLLEWLQN

SEQ ID NO: 805 - protein, 43 aa, Artificial Sequence
  Synthetic
SQEELKKKVKKVLKSGDEERAKRLLQRAGVDDRQVEEIIRKLK

SEQ ID NO: 806 - protein, 40 aa, Artificial Sequence
  Synthetic
QMEIEVEGEEKAMRLMKELRARNLHVEVEHHGDKIILRVE

SEQ ID NO: 807 - protein, 43 aa, Artificial Sequence
  Synthetic
DERAKKIVEELLRKGVSDEEVDRILQRYGVDKKEVEDLIRRLK

SEQ ID NO: 808 - protein, 43 aa, Artificial Sequence
  Synthetic
IEEVEELVRKLLRNGVDDEQVKEILRRQGYSDEQVKEAQRKVK

SEQ ID NO: 809 - protein, 43 aa, Artificial Sequence
  Synthetic
DEDVRKIIKRLLENGVSDEEIKEILKRRGFDPRDVDRIIKELK

SEQ ID NO: 810 - protein, 43 aa, Artificial Sequence
  Synthetic
PEDDEVVKRLAKLLGVDDEQAKEYVKRLGVDLKQAVEEFERRT

SEQ ID NO: 811 - protein, 40 aa, Artificial Sequence
  Synthetic
SETYEYEGDEAAKKAIKYLRAQNLEFEVEIKNGRYVFHVK

SEQ ID NO: 812 - protein, 43 aa, Artificial Sequence
  Synthetic
PKEVKDKVKKLLDNGVDPDQVVKILKKQGVDEDEVRKLVRDVS

SEQ ID NO: 813 - protein, 43 aa, Artificial Sequence
  Synthetic
PTEEAKKKAEKAIRSGNKDEARKILKKAGLSEDEAEEIIRRID

SEQ ID NO: 814 - protein, 43 aa, Artificial Sequence
  Synthetic
RPEDAIKLIQEAIERGDEDKARKIAKKYGISEEQWQRAKKKAD

SEQ ID NO: 815 - protein, 43 aa, Artificial Sequence
  Synthetic
LEEVEKHVRRLVRNGVDPRQIKDQLKKLGVDDRQVDEIVKKAM

SEQ ID NO: 816 - protein, 43 aa, Artificial Sequence
  Synthetic
DPREELAKRVYKRVNGDEDKVREILQRLGVDDEEVERLVRRLS

SEQ ID NO: 817 - protein, 40 aa, Artificial Sequence
  Synthetic
SIKVEFDGEEQARRFIKEMRAQNLEAKIKIENGKWVVEVD

SEQ ID NO: 818 - protein, 40 aa, Artificial Sequence
  Synthetic
SVTYRVRGPEQMKKMVEILRRQNLEVHVEQRGDEYIITAH

SEQ ID NO: 819 - protein, 40 aa, Artificial Sequence
  Synthetic
RQRFRYDDSEKATRAAKEWKRRGYTVTQEKVNGYFELEVG

SEQ ID NO: 820 - protein, 40 aa, Artificial Sequence
  Synthetic
KYTYTVEGPEQAEKIIKMLRKMNLNVTLRIENGKFIIEAE

SEQ ID NO: 821 - protein, 43 aa, Artificial Sequence
  Synthetic
DEEVKKIVEELLRRGYSDDQIKEILKKNGVDEKEVEDVIKRVK

SEQ ID NO: 822 - protein, 40 aa, Artificial Sequence
  Synthetic
AITIRVQGTEAMKKVVKHLKAHNLQVHVEQHGDQYIVTAE

SEQ ID NO: 823 - protein, 43 aa, Artificial Sequence
  Synthetic
PEEAKKIAKELKKRGYSQDYVREYLKRQGVSEDEIREAEKAYS

SEQ ID NO: 824 - protein, 43 aa, Artificial Sequence
  Synthetic
EEDLERLAQELYKRGKSKDEIKERLRRAGASPEEAERAVQRLG

SEQ ID NO: 825 - protein, 40 aa, Artificial Sequence
  Synthetic
EEQYTFDGEEKARKFYKKMVKKNLDVKIRVENGKWIVHVR

SEQ ID NO: 826 - protein, 43 aa, Artificial Sequence
  Synthetic
KTVHIQGVEYRFDNPEQAVEFALRMAKSLGLQIQFHGDTIRVE

SEQ ID NO: 827 - protein, 40 aa, Artificial Sequence [sequence omitted]

SEQ ID NO: 828 - protein, 43 aa, Artificial Sequence
  Synthetic
SEDLEKLVKELKKRGVSPEEIKEALKRAGASDEQVRKILERAL

SEQ ID NO: 829 - protein, 43 aa, Artificial Sequence
  Synthetic
GEVHVQGVTYKFDNPEEAVKFAREMAKKLGLTVEYHGETLKVE

SEQ ID NO: 830 - protein, 40 aa, Artificial Sequence
  Synthetic
SQTYTFDGKEKALRMWKHLADMNLNVRVRVENGKWVVEAE

SEQ ID NO: 831 - protein, 43 aa, Artificial Sequence
  Synthetic
TTVHIGNVTYHFDNPREAEEFAKKVAKKLGLRVEMDNGNFKVE

SEQ ID NO: 832 - protein, 43 aa, Artificial Sequence
  Synthetic
SQEEVKRRAKELLKNGNEEEVDKLLKKAGISDEEIKKLKREVL

SEQ ID NO: 833 - protein, 43 aa, Artificial Sequence
  Synthetic
PEELERKAKELYKNGVDPRQVEEWLRRQGVSDEEVKEIVDRLE

SEQ ID NO: 834 - protein, 43 aa, Artificial Sequence
  Synthetic
TTVHIGNYTYHFDNPEEAKEWAKKMAKKLNLQIEIHGEEIHVQ

SEQ ID NO: 835 - protein, 43 aa, Artificial Sequence
  Synthetic
DEKIKRIIERLLRQGVSEEQVKKILKKKGVSDEQIERVLREVS

SEQ ID NO: 836 - protein, 43 aa, Artificial Sequence
  Synthetic
DEEIKKIVKRLIDNGVSKEEIRRAARRLNLDEEQVRKVVERIM

SEQ ID NO: 837 - protein, 40 aa, Artificial Sequence
  Synthetic
SITLTSHGEEQARKIMKMLKKRNLKVEIHVHNGRFILTAK

SEQ ID NO: 838 - protein, 43 aa, Artificial Sequence
  Synthetic
DEDAKRIADKLKKQGWSDEQIERILRRQGVSDEAIKEVRKYLS

SEQ ID NO: 839 - protein, 43 aa, Artificial Sequence
  Synthetic
IEEVEKIVRELLKKGVDPEQIKEILRRKGIDPREVEKAVRRAI

SEQ ID NO: 840 - protein, 43 aa, Artificial Sequence
  Synthetic
SEKDKRIREIARRLGISEELVRRLLDRANGDEERVKDLVRKYM

SEQ ID NO: 841 - protein, 43 aa, Artificial Sequence
  Synthetic
KTVHVQGVEYRFNNPEEALKFAQKMAKDLNLTMEIHGDTIHVE

SEQ ID NO: 842 - protein, 43 aa, Artificial Sequence
  Synthetic
NDEVKKIVERLLRQGVDEEQIKEILKRQGVDDKDVERAVREVS

SEQ ID NO: 843 - protein, 43 aa, Artificial Sequence [sequence omitted]

SEQ ID NO: 844 - protein, 43 aa, Artificial Sequence
  Synthetic
TTVHVNGVTYHFSSPEEMYKFAVKIAKELGLRVEVHGDTVHVE

SEQ ID NO: 845 - protein, 43 aa, Artificial Sequence
  Synthetic
DERVEKIVRDLKKHGVSREEIKEYLRRQGVDPRLVEQAVRKVG

SEQ ID NO: 846 - protein, 43 aa, Artificial Sequence
  Synthetic
TTVDVNGKKYTFESPEQAKQFAKEIAKKYNLTVHIHGPTVTVK

SEQ ID NO: 847 - protein, 43 aa, Artificial Sequence
  Synthetic
DEEAEKVAERLYRNGVSEEEIKKVLKELGVDPREVKEIVDRLS

SEQ ID NO: 848 - protein, 43 aa, Artificial Sequence
  Synthetic
LTVHVNGIQYHFDKPEQAEKFAKEMAKRLGLEVRLHGNKWRVE

SEQ ID NO: 849 - protein, 43 aa, Artificial Sequence
  Synthetic
KEEELKKQIQEALERGDEDTAKEVARRAGYSDEWLKELRKKLN

SEQ ID NO: 850 - protein, 43 aa, Artificial Sequence
  Synthetic
DEEVKKKLERLLRNGVDKRQVEEILRRQGVDPREIDKVLKELD

SEQ ID NO: 851 - protein, 40 aa, Artificial Sequence [sequence omitted]

SEQ ID NO: 852 - protein, 43 aa, Artificial Sequence
  Synthetic
MTVHINGVEYRFDNPEQMVKFAQKMAKDLNLKIEFHGNTVHVE

SEQ ID NO: 853 - protein, 43 aa, Artificial Sequence
  Synthetic
DEEAEKVFERLIRQGYSPEQVKRVLQRLGVSDEEIKEIERRVS

SEQ ID NO: 854 - protein, 43 aa, Artificial Sequence
  Synthetic
DEEVEKIVERLYRNGVSEEEIKEILRRNGVDEREVQDVIRKIS

SEQ ID NO: 855 - protein, 43 aa, Artificial Sequence
  Synthetic
RPEDYKKLAEELVKQGNREEAEKALRKAGVDEEEARRFIDKVE

SEQ ID NO: 856 - protein, 43 aa, Artificial Sequence
  Synthetic
PDEVVKIVRRLQKQGISDEQIKEILERQGVDPREVKEAIDLVS

SEQ ID NO: 857 - protein, 43 aa, Artificial Sequence
  Synthetic
DEKVKRLVEDLRRRGLSDEEVEKYLKRQGVSPEEIEKVQRIFK

SEQ ID NO: 858 - protein, 40 aa, Artificial Sequence
  Synthetic
SITIEVHGEEKARKVYEMLARRNLDVKVEKRGDKLVITAE

SEQ ID NO: 859 - protein, 43 aa, Artificial Sequence
  Synthetic
TEELKKEADKLKKNGVSKEQVKKYLQRQGVDEEEVKEILKAVF

SEQ ID NO: 860 - protein, 43 aa, Artificial Sequence
  Synthetic
TTVVIGDERYTFDTPEAALKFAQKYAKEKGAEVQFHNGEVQVH

SEQ ID NO: 861 - protein, 40 aa, Artificial Sequence
  Synthetic
EITYHVTGEEQARRVEKWARDQNLEVHIEEKNGNFIIHVR

SEQ ID NO: 862 - protein, 43 aa, Artificial Sequence
  Synthetic
DDRVKRIVEELKRRGVDREQVKEILKRQGVDDRQVKEAIELVF

SEQ ID NO: 863 - protein, 43 aa, Artificial Sequence
  Synthetic
PRDELLKKVLEALKRGDQEKIQELAKALNVSEQQAKELAKKFE

SEQ ID NO: 864 - protein, 43 aa, Artificial Sequence
  Synthetic
PEELKKEIKELKRRGISEEQVREILRRNGVDEKEVDKVIKEVG

SEQ ID NO: 865 - protein, 43 aa, Artificial Sequence
  Synthetic
LEEYEKEVEKLLKRGVDEEQVKEWLKKAGLSDEQVEEIVRRVS

SEQ ID NO: 866 - protein, 43 aa, Artificial Sequence
  Synthetic
ATVHVNGVTYHFPNLQEALKFAKKMAKKHNLRVELHNGEVHVE

SEQ ID NO: 867 - protein, 43 aa, Artificial Sequence
  Synthetic
IEEIKRKLEELQRRGVSDEEVIKILKKQGVDERQVEDVLRKLK

SEQ ID NO: 868 - protein, 43 aa, Artificial Sequence
  Synthetic
PKEDLKEKAKEAFKNGNEDKARELLKRAGVSEEEAKRIIKKLR

SEQ ID NO: 869 - protein, 43 aa, Artificial Sequence
  Synthetic
DDEAVKIFQELKRRGVDEEQVKEILRRLGVDPRQVEQVRKAAS

SEQ ID NO: 870 - protein, 40 aa, Artificial Sequence
  Synthetic
EINMTFDGEEQAAKAMEWAKRQNLEAHVTVENGKWVVTIK

SEQ ID NO: 871 - protein, 40 aa, Artificial Sequence
  Synthetic
SVTITVHGTELAMRIMKEARKRNLNVEVETHGDRYIITIK

SEQ ID NO: 872 - protein, 43 aa, Artificial Sequence
  Synthetic
STVNVGDKTYTFPNPELAKKFAQWAAKKWNLEYTVKNGEFTVQ

SEQ ID NO: 873 - protein, 43 aa, Artificial Sequence
  Synthetic
DEEKVKKEVKKWIDEGNEEKAREVLKRAGFDDDQVDKIVRELK

SEQ ID NO: 874 - protein, 40 aa, Artificial Sequence
  Synthetic
STTYHYDTPEAAKEAAQKFRNQGLDVQVTQKNGKFQVHVK

SEQ ID NO: 875 - protein, 43 aa, Artificial Sequence
  Synthetic
PEKVARIAEELYRRGKSPEEVKKILRKLGVSEEEIERAERAIR

SEQ ID NO: 876 - protein, 43 aa, Artificial Sequence
  Synthetic
PEEELKKKIKQALQEGNREKAKRLAKEYGYDPEFVKKVEKELR

SEQ ID NO: 877 - protein, 40 aa, Artificial Sequence
  Synthetic
KITVEQEGEEAARRVIEWAKRANLEVHVRIENGKWVIELS

SEQ ID NO: 878 - protein, 43 aa, Artificial Sequence
  Synthetic
ATVHVNGLTYHFDNPEKAKKFALEVARKLGLKLEIHGEEIHVE

SEQ ID NO: 879 - protein, 43 aa, Artificial Sequence
  Synthetic
PPDLEEIAKKLAKKGYSTDEIREILRSLGASPDLAEEIARRAV

SEQ ID NO: 880 - protein, 43 aa, Artificial Sequence
  Synthetic
LTVHVGNVTYHFDNPEQAEEWAKRMAKKYQGQIHVKDGQFRIE

SEQ ID NO: 881 - protein, 43 aa, Artificial Sequence
  Synthetic
TKDELKKRAEEAARRGNKDKARKLLQKAGVSDDEAEKILRNIG

SEQ ID NO: 882 - protein, 43 aa, Artificial Sequence
  Synthetic
PEHVKKTVERLLRNGVDDEQIKEQLKRQGVDEREVEEIIRRLK

SEQ ID NO: 883 - protein, 40 aa, Artificial Sequence
  Synthetic
RMTITVDGPEQAKALYDMAMKRNLRVEIQIHNGKYVVHFD

SEQ ID NO: 884 - protein, 43 aa, Artificial Sequence
  Synthetic
YTVDVGNVTYHFDTPEQARKFAERMAKELNLKLELHNGKWRVE

SEQ ID NO: 885 - protein, 43 aa, Artificial Sequence
  Synthetic
DEEIERIVKELLDRGVSEEQVKRILKRQGVDPRKIEEVVRRVS

SEQ ID NO: 886 - protein, 40 aa, Artificial Sequence
  Synthetic
AIEIRVRGDEAMKKAVKEMQDRNLEVHWERRGDEWVIEVR

SEQ ID NO: 887 - protein, 43 aa, Artificial Sequence
  Synthetic
VEEKRKLVEELRKKNISEEQVRKQLKRQGWSDEEVEEIVRLVS

SEQ ID NO: 888 - protein, 43 aa, Artificial Sequence
  Synthetic
TEEVEKIVERLIKNGVDDRQIKEILRKRGVSDEEVDRVIKKIK

SEQ ID NO: 889 - protein, 43 aa, Artificial Sequence
  Synthetic
LEEAERIVEKLKKNNVSEEQIDRILKKLGLNDEQVEEVKRRVG

SEQ ID NO: 890 - protein, 43 aa, Artificial Sequence
  Synthetic
ATVHIGNLTYHFENPEEAVKFALEMARKLGLKIEVHGNEVRVE

SEQ ID NO: 891 - protein, 43 aa, Artificial Sequence
  Synthetic
GTVHVNGVQYHFSSLEEAAKFALKMAREQGRRVEFHGDTIHVE

SEQ ID NO: 892 - protein, 43 aa, Artificial Sequence
  Synthetic
NEEVEEKVEKLYKNGVDPRQIEERLKRQGVDPREVKRALRKVI

SEQ ID NO: 893 - protein, 43 aa, Artificial Sequence
  Synthetic
TEKAKEIAEKLYRNGISPDEIREILQKLGVSDQEAEEAARYAE

SEQ ID NO: 894 - protein, 43 aa, Artificial Sequence
  Synthetic
TTVHVKGVTYHFDNPEKAKKFAKKIAKELNATVEIHGDEIHVD

SEQ ID NO: 895 - protein, 43 aa, Artificial Sequence
  Synthetic
ITVDVNGVTYHFDNPEEAYKFVVRVARELNLTYEWHGNKVRVE

SEQ ID NO: 896 - protein, 40 aa, Artificial Sequence
  Synthetic
QETIEVEDEEEARRVAKELRKKGYEVKIERRGNKWHVHRT

SEQ ID NO: 897 - protein, 43 aa, Artificial Sequence
  Synthetic
SEEVRKKVEELLRRGVSDDQIKEHLKRQGVDPREVDEILKQIK

SEQ ID NO: 898 - protein, 40 aa, Artificial Sequence
  Synthetic
TTTITTTNEEDARRIATEWKNKGYTVHVEKRGTTFRIEVR

SEQ ID NO: 899 - protein, 43 aa, Artificial Sequence
  Synthetic
DERVEKQLRKLLRDGYSDDEVKEILKRQGVDPREIEDLLRKAK

SEQ ID NO: 900 - protein, 43 aa, Artificial Sequence
  Synthetic
DEKVEKIIRKLIQDGIDPRQVREILKKRGVDPREVEDVLRKVL

SEQ ID NO: 901 - protein, 43 aa, Artificial Sequence
  Synthetic
DEEELRRELEKALRKGDEDKVRRIARRIGIDDRQVEKLLKDIL

SEQ ID NO: 902 - protein, 43 aa, Artificial Sequence
  Synthetic
DEKVERLVEELYRNGVSEEEIVRILKKQGIDEEQVRRVVKKVS

SEQ ID NO: 903 - protein, 40 aa, Artificial Sequence
  Synthetic
TIKTQYDNKEEAQKAAKKYLKQGYDVQITQVGNTWQVQVH

SEQ ID NO: 904 - protein, 43 aa, Artificial Sequence
  Synthetic
RDEDEKKKAKKLVKSGNPDKAKELLKRLGYSEDEAEQIVRDIG

SEQ ID NO: 905 - protein, 43 aa, Artificial Sequence
  Synthetic
SEDKARELARELVRQGNEDEARRLLKEAGFSPQQIEEVIQEAK

SEQ ID NO: 906 - protein, 43 aa, Artificial Sequence
  Synthetic
PEEAKEKAERLWRNGQDPEKVKEFLRNAGVSEEEAEKFVKKLN

SEQ ID NO: 907 - protein, 40 aa, Artificial Sequence
  Synthetic
ELRIEVDGEEQAKKVIEMAKRRNLEVHITVENGKLVLHLR

SEQ ID NO: 908 - protein, 43 aa, Artificial Sequence
  Synthetic
AQVHLNGYTYHFETLEQAVRFAQKVAKELGLRVEIHGEQIHVE

SEQ ID NO: 909 - protein, 43 aa, Artificial Sequence
  Synthetic
DEEVERIVEKLLRNGVSEDEIRKILERRGIDPREIEKALKRVS

SEQ ID NO: 910 - protein, 40 aa, Artificial Sequence
  Synthetic
TKTYTFPDKEEAEKWAKHLAKQGIKVQVTKNGDTWQVKEH

SEQ ID NO: 911 - protein, 43 aa, Artificial Sequence
  Synthetic
SPEDLKEEARKAAENGDPEKARELLERAGLDKEQAERVIKKLL

SEQ ID NO: 912 - protein, 43 aa, Artificial Sequence
  Synthetic
TEEIEREVKKLLDNGVDDRQVREILRRNGVDEDEVDRVIKKVK

SEQ ID NO: 913 - protein, 43 aa, Artificial Sequence
  Synthetic
NDKAKEIADRLKKKGKSPDEIEKILRKLGVSEEDIKELKKLLS

SEQ ID NO: 914 - protein, 43 aa, Artificial Sequence
  Synthetic
EEEVERLVERLLRNGVDKRQIEEIVKRQGIDPRKVREVLRKLK

SEQ ID NO: 915 - protein, 43 aa, Artificial Sequence
  Synthetic
ATVHFGNVTYHFENPEKAVEFAKKLAKKHNLTFEMHNGNLHVK

SEQ ID NO: 916 - protein, 43 aa, Artificial Sequence
  Synthetic
TTVEVNGVRYDFESLEQAKKFALKVAKSLGLTVEFRGETIHVE

SEQ ID NO: 917 - protein, 43 aa, Artificial Sequence
  Synthetic
DERVEKLVKEIRERNLSDEQVEEDLRKRGVDEDIIRKVLRAVK

SEQ ID NO: 918 - protein, 43 aa, Artificial Sequence
  Synthetic
SDELVKEAERLLRNGVDPKQIEEILRRNGVSPDDIRRVLRLVS

SEQ ID NO: 919 - protein, 40 aa, Artificial Sequence
  Synthetic
SLTLTFEGEEAAKRFAEWAKKANLEFEVQIHNNRFVITVD

SEQ ID NO: 920 - protein, 43 aa, Artificial Sequence
  Synthetic
PEEVKKKAEELARRGVDPEQIKRILRKQGVSDEELKEVEKAVG

SEQ ID NO: 921 - protein, 40 aa, Artificial Sequence
  Synthetic
EVTYTIDGEEKARRLYEKLKQQNLDVKIRVENGKWVVTAS

SEQ ID NO: 922 - protein, 43 aa, Artificial Sequence
  Synthetic
SEEAKKLAEELKRRGASPETIRRWLRKQGYSEEEAKRAEEYAR

SEQ ID NO: 923 - protein, 43 aa, Artificial Sequence
  Synthetic
TEVHVQGVTYHFSNPEEAVRFAQEMAKKLNLRIEFHGDTIHVE

SEQ ID NO: 924 - protein, 43 aa, Artificial Sequence
  Synthetic
DKRLEDDVKRLLDSGVDPEQVKEILKRNGVDPRQVEKVLRKVR

SEQ ID NO: 925 - protein, 43 aa, Artificial Sequence
  Synthetic
DDRLKEIVERLKKNGVSDEQIKKILQRRGVDERQVQEAIRQVV

SEQ ID NO: 926 - protein, 40 aa, Artificial Sequence
  Synthetic
EITLTSHGDEQAQRIYEHWAKRNYEIHVEKHNGRIILHIR

SEQ ID NO: 927 - protein, 43 aa, Artificial Sequence
  Synthetic
DQEELKERVERLVRNGNQDEARKVLRQAGIDPREVEKILRRLG

SEQ ID NO: 928 - protein, 43 aa, Artificial Sequence
  Synthetic
DEDVKRLVEEVQKKGLSEEEIRKELQRRGVDERQIEEVLRLFK

SEQ ID NO: 929 - protein, 43 aa, Artificial Sequence
  Synthetic
RPEEYEQRAKEALKEGNKDKARELLKKAGYSPDEAEEIIRRIG

SEQ ID NO: 930 - protein, 43 aa, Artificial Sequence
  Synthetic
RDEVRELFKRLTDSGYSPDEVADILRKQGVDPREVEDAKRYYG

SEQ ID NO: 931 - protein, 43 aa, Artificial Sequence
  Synthetic
QQVDVDGVTYKFDEPEQALKFALEMAKKKGGQVKFKDGTYRVE

SEQ ID NO: 932 - protein, 40 aa, Artificial Sequence
  Synthetic
RITMEFDGEEQAKRAMKHARKQNLRAEVEVKNGKYVVHIE

SEQ ID NO: 933 - protein, 43 aa, Artificial Sequence
  Synthetic
ITVHVDNVTYHFNNPEEVKKFAREMAEKKGLKVEFHGNEVHIE

SEQ ID NO: 934 - protein, 43 aa, Artificial Sequence
  Synthetic
DEEIKKLVKEARDKNLSEEQIKKLVKRQGYSDEQVERVVRLVS

SEQ ID NO: 935 - protein, 43 aa, Artificial Sequence
  Synthetic
PEKAKRIVEKLIRNGVTPDEIKKIAKKLGLSEDTVEEIIRRIY

SEQ ID NO: 936 - protein, 43 aa, Artificial Sequence
  Synthetic
TTVQFNGYEYHFPSPEEAYKFAVEVARKLGGTVKLKGDTIQIE

SEQ ID NO: 937 - protein, 43 aa, Artificial Sequence
  Synthetic
VTVHVGNVTYHFPNPEEAKEFARRVAETLGLQVEIHGNTIKVK

SEQ ID NO: 938 - protein, 43 aa, Artificial Sequence
  Synthetic
KRVNVNGVEYKFDNPEEAEKFARRMAKEQNLKIEFHGDTIRVE

SEQ ID NO: 939 - protein, 40 aa, Artificial Sequence
  Synthetic
SFEVTFDGEEKARRMVEWAKKANYEAELRVKNNKWTVRID

SEQ ID NO: 940 - protein, 43 aa, Artificial Sequence
  Synthetic
MQVDVNGVTYTFDNPEEAVKFALKIAKELNLKVEFHGNTIKVE

SEQ ID NO: 941 - protein, 40 aa, Artificial Sequence
  Synthetic
EWEITVEGEEQAKRVLKHWRAMNYEAKIRVENNQIIIHVK

SEQ ID NO: 942 - protein, 43 aa, Artificial Sequence
  Synthetic
DERLKRIVDELKRRGVDDEQIKDILRRNGVSDEQVERVLKEYK

SEQ ID NO: 943 - protein, 43 aa, Artificial Sequence
  Synthetic
NEEVEKIVKDLLRKGVDDEQVKEELRRRGVDEKEVQRAVRKVK

SEQ ID NO: 944 - protein, 43 aa, Artificial Sequence
  Synthetic
IEEELKKRAEEVLKQGNKDEVRELLKRAGVDDRQVEEFIKRHD

SEQ ID NO: 945 - protein, 43 aa, Artificial Sequence
  Synthetic
PEKYKEIARKLLEKGVDPSEIKEILERLGLDPELAEKIVRNLM

SEQ ID NO: 946 - protein, 43 aa, Artificial Sequence
  Synthetic
TTVYFGNTTYTFDTPQKAAEYAKKLAEKYNAEVHIDGNKITIK

SEQ ID NO: 947 - protein, 43 aa, Artificial Sequence
  Synthetic
TEEEKIIKKIAREIGVSEEIVRRALREANGDQDKVKEIVRKLK

SEQ ID NO: 948 - protein, 43 aa, Artificial Sequence
  Synthetic
LEKAEEIAKKLYDNGVSPDQIREILKRAGVSDDDVEKALRKVA

SEQ ID NO: 949 - protein, 43 aa, Artificial Sequence
  Synthetic
SEEVKEIVKQLVENGVSEEQIKRILKKRGIDDKEVDKAVKDVK

SEQ ID NO: 950 - protein, 43 aa, Artificial Sequence
  Synthetic
LEELKKQVRELHRRGADPRQIKKILQDQGVDEREVQRILKEAI

SEQ ID NO: 951 - protein, 43 aa, Artificial Sequence
  Synthetic
DEEVEKKVRDLYKQGWDKEQITKILRRQGIDPRKVEHAVKKVG

SEQ ID NO: 952 - protein, 43 aa, Artificial Sequence
  Synthetic
EEEAQRIVERLLRNGVSDEEITKILRKLGISDEEVKKVIRQVK

SEQ ID NO: 953 - protein, 43 aa, Artificial Sequence
  Synthetic
PEEAKKVVEKLQREGYSLDQIYEIAKRRGDEDVVKIVQRLKRS

SEQ ID NO: 954 - protein, 40 aa, Artificial Sequence
  Synthetic
EIKIETHGEEKAMALMKMFRKRNLRVEVEKHGNKLIIQVK

SEQ ID NO: 955 - protein, 40 aa, Artificial Sequence
  Synthetic
TTRYHFDTEDAAKEFAKKAAKQGLEVHVTQVNGTWVVEVQ

SEQ ID NO: 956 - protein, 43 aa, Artificial Sequence
  Synthetic
DEEVRKTVEELARRGVDQEQIKKILKRLGVDDRQVEKIVKEVK

SEQ ID NO: 957 - protein, 43 aa, Artificial Sequence
  Synthetic
DERVERIIRDLKRRGISKEQIKKILERQGVDPREVEKVIREVG

SEQ ID NO: 958 - protein, 43 aa, Artificial Sequence
  Synthetic
ATVHVNGYTYHFDKPEQAYKFALKVAQELGLQMHVKDGEFHVE

SEQ ID NO: 959 - protein, 43 aa, Artificial Sequence
  Synthetic
TTVHVNGIQYHFPNPEEAYRFALEVARKNNLEMRLHGNTIHVE

SEQ ID NO: 960 - protein, 43 aa, Artificial Sequence
  Synthetic
DEEVERIVRELQRRGVDPRQIKEILERNGVDPRQVDKVIRQVA

SEQ ID NO: 961 - protein, 43 aa, Artificial Sequence
  Synthetic
REEAERIVRELYKQGVSDEEIKRILERAGVDPKEVEELIRRVK

SEQ ID NO: 962 - protein, 43 aa, Artificial Sequence
  Synthetic
ATVDLNGLKYEFSSPEQAKRFALEMAKKLNLKVEFHGDTITIR

SEQ ID NO: 963 - protein, 40 aa, Artificial Sequence
  Synthetic
GVTYEVHGEEQAKALIKMAEKRNLQWELRIENGRFVVTID

SEQ ID NO: 964 - protein, 43 aa, Artificial Sequence
  Synthetic
LTVHVGNVTYHFDEPEQAKKFAERMARELNLRVELHGNQLRVE

SEQ ID NO: 965 - protein, 43 aa, Artificial Sequence
  Synthetic
SKDEAQREAERAIRSGNKEEARRILEEAGYSPEQAERIIRKLG

SEQ ID NO: 966 - protein, 43 aa, Artificial Sequence
  Synthetic
ATVEVQGIEVHFDNPEEAVKYARRVAKELNLRIEFHGDTIHIR

SEQ ID NO: 967 - protein, 43 aa, Artificial Sequence
  Synthetic
PEDLERRVEELLRRGIDKEQIKDILRKQGVSEEEVQKIVEKVA

SEQ ID NO: 968 - protein, 43 aa, Artificial Sequence
  Synthetic
QDEVKKIVEKLVKNGVSEEQIRKILKRRGVSDEAVDKAVKEAM

SEQ ID NO: 969 - protein, 43 aa, Artificial Sequence
  Synthetic
NEDAEKEIRELYKNGVSPEQLQEILRRQGYNDEQVKKIVKRAI

SEQ ID NO: 970 - protein, 43 aa, Artificial Sequence
  Synthetic
DERVERIVKRLLDNGVSDEQVRRIVKRYGVSERQVDEAIRKVK

SEQ ID NO: 971 - protein, 40 aa, Artificial Sequence
  Synthetic
EIRIEVEGEEQAKKWLEWAKAHNLSVEAQIHNGKFVLHIN

SEQ ID NO: 972 - protein, 43 aa, Artificial Sequence
  Synthetic
SEKVRRIVKRLLDQGVSPEQIEKILRENNISEEEIEDAKRYVF

SEQ ID NO: 973 - protein, 43 aa, Artificial Sequence
  Synthetic
AQVKFNGITVQFDNPEEAKRWAKEVAEKLQGQVHYKDGTFEIH

SEQ ID NO: 974 - protein, 40 aa, Artificial Sequence
  Synthetic
SIEITVDGEELARKIVKEARKHNLEARIEIHNGKYVVKIE

SEQ ID NO: 975 - protein, 43 aa, Artificial Sequence
  Synthetic
PEELLKKVKKAIDSGDEDTVKEIAKRLGVDPEELKDLVRRLES

SEQ ID NO: 976 - protein, 40 aa, Artificial Sequence
  Synthetic
TKTFKYDTKEAAQEALKKWQKQGKDVQITQKNGTWQLEVN

SEQ ID NO: 977 - protein, 43 aa, Artificial Sequence
  Synthetic
NKELEDRARKLAKNKGDPRKVRELLRRAGVSEDEIKKIEKKYG

SEQ ID NO: 978 - protein, 43 aa, Artificial Sequence
  Synthetic
DEEVEKIVEELLRRGVDPDQVKKILQRHGVDDREVDRAVRRVL

SEQ ID NO: 979 - protein, 43 aa, Artificial Sequence
  Synthetic
TKVHIGNETYKFPSAEAAWKWAQKVAQKLGKQVELHGNEVHVK

SEQ ID NO: 980 - protein, 43 aa, Artificial Sequence
  Synthetic
ITVHVNGVQYHFDNPEQAEKFAKKIAKELNLEVQIHGNTLRVE

SEQ ID NO: 981 - protein, 40 aa, Artificial Sequence
  Synthetic
QIEYTFDGEEQARKAAEWAAKANLKFELRQENGKWVLTVE

SEQ ID NO: 982 - protein, 43 aa, Artificial Sequence
  Synthetic
NEEVKKIVERLLRNGVDKRQVKKILKEQGIDEKEVEDVLKRVQ

SEQ ID NO: 983 - protein, 40 aa, Artificial Sequence
  Synthetic
QITFEVHGEEQAKRIAKEMKKRNLQVEIKVENGKWILHVK

SEQ ID NO: 984 - protein, 40 aa, Artificial Sequence
  Synthetic
TIDIETTNKEEAERIAREAKKKGLTVTVTKENGRWRVTIE

SEQ ID NO: 985 - protein, 43 aa, Artificial Sequence
  Synthetic
RTEEAKKKAEKAVRNGDPEKARKILESAGLSTEQAERIIRKLM

SEQ ID NO: 986 - protein, 43 aa, Artificial Sequence
  Synthetic
PEDIKKEIQRLYKEGVTPDDIREWARQAGLTEDLIEEALKKAA

SEQ ID NO: 987 - protein, 43 aa, Artificial Sequence
  Synthetic
VTVHVDGLTYHFDNPEQALKFALKVVKEKNGNMEVRGNTIHIK

SEQ ID NO: 988 - protein, 43 aa, Artificial Sequence
  Synthetic
TTVQFDGYEFHFDNPEEAEKFAREVAKRKNGEVQLHNGTFHIK

SEQ ID NO: 989 - protein, 43 aa, Artificial Sequence
  Synthetic
TTVEVNGTKYQFDTPEEAWKWAKKVAKKQGLEVHIKNGTVHLH

SEQ ID NO: 990 - protein, 43 aa, Artificial Sequence
  Synthetic
PDEVRKIVRELLKNGVDDRQVVKILRDNGVDPRLVEKLVRELS

SEQ ID NO: 991 - protein, 40 aa, Artificial Sequence
  Synthetic
QMHIEVEGEEQLKRAIEEMKKRNLEFRVEKHGDRYVLQVD

SEQ ID NO: 992 - protein, 43 aa, Artificial Sequence
  Synthetic
STVEVDGLKYTFDNPEQALKFALKVAKERNLTVKLHGDDYRVE

SEQ ID NO: 993 - protein, 43 aa, Artificial Sequence
  Synthetic
DDKVKKLVEDLQRNGVSDEEVTKILKRRGVDEDTVREILRRLS

SEQ ID NO: 994 - protein, 40 aa, Artificial Sequence
  Synthetic
KITYRVTGEEQMRRLVEELKRHNLRVKVEKHGDQYIVHAE

SEQ ID NO: 995 - protein, 43 aa, Artificial Sequence
  Synthetic
STEELKKKAEKALRSGNKDKARKLLEKAGYSTDEAEKILRKLG

SEQ ID NO: 996 - protein, 43 aa, Artificial Sequence
  Synthetic
ATVRWNGYEVTFNNPEEALKYALKVAKELGRDVELHNGTFHIE

SEQ ID NO: 997 - protein, 43 aa, Artificial Sequence
  Synthetic
TPLLELAKLAEDRGITVTVTIGDTTYTITSPEAAQYAIKLLQK

SEQ ID NO: 998 - protein, 40 aa, Artificial Sequence
  Synthetic
QVTVTVEGEEQAKKMLEWAKRANLEIHVEQHGDKYILTAE

SEQ ID NO: 999 - protein, 43 aa, Artificial Sequence
  Synthetic
ATVEIQGVRYTFPNPEQAKKFAQRMAEELGLKIEYHGEHIEVK

SEQ ID NO: 1000 - protein, 43 aa, Artificial Sequence
  Synthetic
TTVHIGNVTYHFDNPEEAVKWAKEMAEKLGLRIEIHGDTIRVE

SEQ ID NO: 1001 - protein, 43 aa, Artificial Sequence
  Synthetic
PEEVEKIVEELNRRGVDKEQIKEDLRRRGVDERAIQEAIRKIK

SEQ ID NO: 1002 - protein, 43 aa, Artificial Sequence
  Synthetic
ATVQMGNLEWHFENPEKAEKFARELAKKQGLRLELHNGTFRVE

SEQ ID NO: 1003 - protein, 43 aa, Artificial Sequence
  Synthetic
QTVHVQGITVTFDNPEQAKKYAEEMARKLGLRVELHNGHLHVE

SEQ ID NO: 1004 - protein, 43 aa, Artificial Sequence
  Synthetic
RDEEAKKLIEEALKDGSEDKARELARQAGVSDEQAERIIQELR

SEQ ID NO: 1005 - protein, 43 aa, Artificial Sequence
  Synthetic
KTVDVNGVEYTFSNPEQAVKFALEVAKKLGGQVEWHGDRIEIK

SEQ ID NO: 1006 - protein, 40 aa, Artificial Sequence
  Synthetic
EQTYEVEGEEKMHALVKWAKAQNLEVHVQQDGDRWIITIS

SEQ ID NO: 1007 - protein, 43 aa, Artificial Sequence
  Synthetic
ATVHVNGVQYHFPNPEEAKKFAKKVAEDLGLTFEVRGDDIKVE

SEQ ID NO: 1008 - protein, 40 aa, Artificial Sequence
  Synthetic
GWEFHVSGEEQAKRVEKMLRKMNLQVEVQEHNGHYVIRAE

SEQ ID NO: 1009 - protein, 43 aa, Artificial Sequence
  Synthetic
SEEAEKTVRRLLQNGVSDDQIRKILQRLGYSDEDVKRIQRRVK

SEQ ID NO: 1010 - protein, 43 aa, Artificial Sequence
  Synthetic
SEEELKRKAEEAARRGNKEKAEEILRRAGVSEEEIEEILRRIG

SEQ ID NO: 1011 - protein, 43 aa, Artificial Sequence
  Synthetic
MDDIKRKVKELQKQGVSKEQIKEWFQRQGIDHREVDKVLKDLG

SEQ ID NO: 1012 - protein, 40 aa, Artificial Sequence
  Synthetic
TTTFTVTDPREAERLAEEWRRRGYTVRIETRGTTVHVTVD

SEQ ID NO: 1013 - protein, 43 aa, Artificial Sequence
  Synthetic
QEEVERLVKELIDRGVDPEQVVEKLKRQGVDEKEVRELIKRVS

SEQ ID NO: 1014 - protein, 43 aa, Artificial Sequence
  Synthetic
TTVQFNGYEFHFEEPEQAKKFAKEVAERLNGEVHLHGNTIKIE

SEQ ID NO: 1015 - protein, 43 aa, Artificial Sequence
  Synthetic
PDEERAIKEVAKLLNVSDEEAKKYVERLGLDPHQVVEKLRRDS

SEQ ID NO: 1016 - protein, 43 aa, Artificial Sequence
  Synthetic
SKEEVKKRVERVVRNGDEERARRILKRANFSDEEIERIIRKVL

SEQ ID NO: 1017 - protein, 43 aa, Artificial Sequence
  Synthetic
NKEVEDIVKDLVERGVDPDEVRKILQRRGVSDEEVERAIRKVL

SEQ ID NO: 1018 - protein, 43 aa, Artificial Sequence
  Synthetic
SEDVRRIAEELLRRGYSPEQIREILERLGVSPDQIKEALKLIS

SEQ ID NO: 1019 - protein, 43 aa, Artificial Sequence
  Synthetic
DEELVRQVKQLLDDGVSEDEVRKILERRGIDPRQVRKLIELAR

SEQ ID NO: 1020 - protein, 43 aa, Artificial Sequence
  Synthetic
PDDATEIAKKLLKKGFSPEQIKQYLEKLGISPEEAKQAVDRLF

SEQ ID NO: 1021 - protein, 43 aa, Artificial Sequence
  Synthetic
TEKAERIARELIKKGISPEEIKDALRKFGVSDEQIEEALKNIF

SEQ ID NO: 1022 - protein, 40 aa, Artificial Sequence
  Synthetic
RITVTVEGDEAAKKVIEEMKRRNLEVHWRKENGRIIIHAE

SEQ ID NO: 1023 - protein, 43 aa, Artificial Sequence
  Synthetic
IEDVERIVKKLLENGVDEEQIKEILKRRGIDDREVDRAVKRVS

SEQ ID NO: 1024 - protein, 43 aa, Artificial Sequence
  Synthetic
EDEAEKLARELAKKGVSPDEIKEILKKLGIDPDEIEEAVNRVN

SEQ ID NO: 1025 - protein, 43 aa, Artificial Sequence
  Synthetic
DEHAEDVVRKLAENGVSPDQIREILKRLGVDDDQVQKLVEKYS

SEQ ID NO: 1026 - protein, 40 aa, Artificial Sequence
  Synthetic
KITIEVHGEEQMKRAVKHLRARNLDVKVEIQGDKIVIHAE

SEQ ID NO: 1027 - protein, 43 aa, Artificial Sequence
  Synthetic
QQEEAKKKAQKAWKNGDEEKARRIARKANTEDWFDEWVRRQNN

SEQ ID NO: 1028 - protein, 40 aa, Artificial Sequence
  Synthetic
TQEIQVKDKKKAEEVAKEWQKKGYEVHVTQNGDTYTVRVK

SEQ ID NO: 1029 - protein, 43 aa, Artificial Sequence
  Synthetic
DEKRKKEIEELLRNGVDPKEIVERLRKKGIDPREVKELVDRVS

SEQ ID NO: 1030 - protein, 40 aa, Artificial Sequence
  Synthetic
GTELTVTNPEEARRIKEEWAKRGYTVTVTEDNGTWTVRIG

SEQ ID NO: 1031 - protein, 43 aa, Artificial Sequence
  Synthetic
AQVHVNGVTYHFSSLEEMLRFVKKVVKELGLQVEFRGSTVHVE

SEQ ID NO: 1032 - protein, 43 aa, Artificial Sequence
  Synthetic
QTVHVNNKTYTFETSEQAQKFAKKVAKKFNLKVTVSGNTVKVK

SEQ ID NO: 1033 - protein, 40 aa, Artificial Sequence
  Synthetic
DLKFTVHGEEQARKLAKELKAQNYEVHIEHHGDQIILKAR

SEQ ID NO: 1034 - protein, 43 aa, Artificial Sequence
  Synthetic
QTVHVNGYTYHFDNPEEAKEFAYKMAKKLGLQVHIHGDTIHVE

SEQ ID NO: 1035 - protein, 43 aa, Artificial Sequence
  Synthetic
PEEAKREVEKWVRNGVSEEELRKIAKRLGISDEEVDKIIKELL

SEQ ID NO: 1036 - protein, 40 aa, Artificial Sequence
  Synthetic
EIRITLEGEEQVKKFLEWAKRQNYEVHVETHGGKYILTAK

SEQ ID NO: 1037 - protein, 43 aa, Artificial Sequence
  Synthetic
ATVHVGNVTYHFENPEKAYKFAVEMARKLGLQVEVHGDTIKVE

SEQ ID NO: 1038 - protein, 43 aa, Artificial Sequence
  Synthetic
NEEVKKIAEELKRRGVSPDQVAEILRRQGVDPEQVKEVRKYLS

SEQ ID NO: 1039 - protein, 43 aa, Artificial Sequence [sequence omitted]

SEQ ID NO: 1040 - protein, 43 aa, Artificial Sequence
  Synthetic
DEKVEREVKKLLENGVSDEEVKRHLKKKGISEEQVDKAIRKVK

SEQ ID NO: 1041 - protein, 43 aa, Artificial Sequence
  Synthetic
PEEVERIVKELLRRGLDERQVREILQRNNVDEREVQKAIRKVS

SEQ ID NO: 1042 - protein, 43 aa, Artificial Sequence
  Synthetic
DKDDVVQRIHEALQKGNEDEVKELVKRLGVSEEEAKEIVRKYM

SEQ ID NO: 1043 - protein, 43 aa, Artificial Sequence
  Synthetic
SDKSQKAIEELKKLGASEEEAEELARRANGDRKKAEELWKKRL

SEQ ID NO: 1044 - protein, 43 aa, Artificial Sequence
  Synthetic
PKKAEEIARKLAENGVSEEEIKKVLKKLGVSDEEAERIAKKVG

SEQ ID NO: 1045 - protein, 43 aa, Artificial Sequence
  Synthetic
PDKVEEIARRLLKNGVSPDEISEILQRLGVTQDEVDRARKIVE

SEQ ID NO: 1046 - protein, 43 aa, Artificial Sequence
  Synthetic
RDEAKKIVEQLIRNGVSPEEAREIAERLGIDPDEAKEILKEIF

SEQ ID NO: 1047 - protein, 40 aa, Artificial Sequence
  Synthetic
QIDITVDGEEKARRIVKELKKHNLEANLRVQNGKWIIHVR

SEQ ID NO: 1048 - protein, 43 aa, Artificial Sequence
  Synthetic
LDEVKKQVRKLLQNGVDDEQVKEYLKRLGISDEQVEKVIRDAK

SEQ ID NO: 1049 - protein, 43 aa, Artificial Sequence
  Synthetic
LEEAQRIARELYKRGVSEDEIRRILKELGFSDEEVDRVVKEVS

SEQ ID NO: 1050 - protein, 43 aa, Artificial Sequence
  Synthetic
REVHVNGVRYQFDNPEEAEKFAKEVAKRLGLQVEIHGPTWKVE

SEQ ID NO: 1051 - protein, 40 aa, Artificial Sequence
  Synthetic
EINVTSHGEEQAKHWIELAKRMNLDVEVEIHGDKIIITIK

SEQ ID NO: 1052 - protein, 43 aa, Artificial Sequence
  Synthetic
NEEVKKVRERAKRGEIDPREVERLLRELNVSEEEIQRILRQVS

SEQ ID NO: 1053 - protein, 43 aa, Artificial Sequence
  Synthetic
LRVEVGNTTYQFDSPEQAERFAKKIAKELGLRVEEHNGTFHIE

SEQ ID NO: 1054 - protein, 43 aa, Artificial Sequence
  Synthetic
SEDVQRRAKELIKEGYSPEEAVNILRKEGVSEEQLKEARKAAF

SEQ ID NO: 1055 - protein, 40 aa, Artificial Sequence
  Synthetic
KFTVQVQGEEAAKAILEWARKANLRAEIEVHGDQVIITIE

SEQ ID NO: 1056 - protein, 43 aa, Artificial Sequence
  Synthetic
DEDKVKERVKEVVKNGNEEEARKLLKRLGLSDEQVDKIIRRVL

SEQ ID NO: 1057 - protein, 43 aa, Artificial Sequence
  Synthetic
DERLKKKVKKLLDNGADDREIKKDLKRAGLSDRQVDELLKRVK

SEQ ID NO: 1058 - protein, 40 aa, Artificial Sequence
  Synthetic
RITYTVHGEEQARKLIRWVQEQNLEAEVRIHGDQIVVHVE

SEQ ID NO: 1059 - protein, 43 aa, Artificial Sequence
  Synthetic
TTVHVNGLTYHFENPQQADEFARRMAKKLGLQVEWHGNTIHIE

SEQ ID NO: 1060 - protein, 43 aa, Artificial Sequence
  Synthetic
SKEEAKKRAEEAVRRGNEDKAREILKRAGYSEDEASEIIKKIG

SEQ ID NO: 1061 - protein, 43 aa, Artificial Sequence
  Synthetic
EDEVRKIVEELARRGYSKEEIRKILQRQGIDEKAIQDALKYVG

SEQ ID NO: 1062 - protein, 43 aa, Artificial Sequence
  Synthetic
MEEVEKIVERLLRNNVDERQIRRYLQEQGVDPRDVDRAIKKVS

SEQ ID NO: 1063 - protein, 43 aa, Artificial Sequence
  Synthetic
PEDVKRIVEKLKRNGLSPEQVRQALHKYGVDPREVEKALREIM

SEQ ID NO: 1064 - protein, 43 aa, Artificial Sequence
  Synthetic
LEVNMNGVTYKFSNPQEAVKFALELAKKAGLRVEIHGNQIHIE

SEQ ID NO: 1065 - protein, 43 aa, Artificial Sequence
  Synthetic
PPKDKKLRTAAKLLGISEEEARRARKKLGVSVEEFLQWAKKQN

SEQ ID NO: 1066 - protein, 43 aa, Artificial Sequence
  Synthetic
TTVKVNGTKYKFDTPEEAQKFAKKAADKYNLKVVVDGDDLRVE

SEQ ID NO: 1067 - protein, 43 aa, Artificial Sequence
  Synthetic
LEELVKHVRELQRRGVSDEQVRKILKKQGVSDEQVERIERLVK

SEQ ID NO: 1068 - protein, 43 aa, Artificial Sequence
  Synthetic
ATVDVNGVTYHFENPEKAEKFAKKIAKDLGGTVEVHGEKFRVE

SEQ ID NO: 1069 - protein, 43 aa, Artificial Sequence
  Synthetic
DEREYKDEVKKVLENGDEDRAREILKRAGISDEEVDKIIRRLI

SEQ ID NO: 1070 - protein, 43 aa, Artificial Sequence
  Synthetic
ITIDVNGVTYHFNNPEEAYKFAVKIAKDLNLRIEFHGNTVKIE

SEQ ID NO: 1071 - protein, 43 aa, Artificial Sequence
  Synthetic
PEEQLRKEARKAAKSGNPDKARELLQRAGVSEDEIDQIIKEAL

SEQ ID NO: 1072 - protein, 43 aa, Artificial Sequence
  Synthetic
PDDKLRKIVIELIQRGNEEKAERFARKAGLSDDEIKNLKKIAG

SEQ ID NO: 1073 - protein, 43 aa, Artificial Sequence
  Synthetic
DEEEVKRRVVKLIRNGDEDEAKKLVRDVGLDDETWKEIRKEVL

SEQ ID NO: 1074 - protein, 43 aa, Artificial Sequence
  Synthetic
HTVQFNGLEFHFPNPEEAKKFAERVAKELGGTIEFHGDTIKIE

SEQ ID NO: 1075 - protein, 43 aa, Artificial Sequence
  Synthetic
DEDIEKKVKRLLENGVDDRQVIEILKRQGVDPREVKEVIERVK

SEQ ID NO: 1076 - protein, 43 aa, Artificial Sequence
  Synthetic
DDRVRRLVEELLRRGYDKEQIVERLKKQGIDEREVRKVLRELG

SEQ ID NO: 1077 - protein, 43 aa, Artificial Sequence
  Synthetic
DERVDRVVERLYRNGVDEEQIKEILKKLGVSDEEVKKAIEKVS

SEQ ID NO: 1078 - protein, 43 aa, Artificial Sequence
  Synthetic
TTVTVNGVNYTFPNPEEADKFAKKVAKELGLQVHYKDDQWHIE

SEQ ID NO: 1079 - protein, 43 aa, Artificial Sequence
  Synthetic
TEVHLGDIKLKYPNPEQAKKAAEKLAQKYNLTWTVIGDYVKIE

SEQ ID NO: 1080 - protein, 40 aa, Artificial Sequence
  Synthetic
KITLTFEGEEAVKKAIEYARRANLEVHFEQHNGQWIAHFS

SEQ ID NO: 1081 - protein, 43 aa, Artificial Sequence
  Synthetic
DDRVKKKVKKLLDNGVDDKQVIDQLKKDGVDERQVEKVIRELK

SEQ ID NO: 1082 - protein, 43 aa, Artificial Sequence
  Synthetic
TEEVEKVVRELLQRGVSEEEVVETLKRRGVDEKEVRKIVKELS

SEQ ID NO: 1083 - protein, 43 aa, Artificial Sequence
  Synthetic
AEVHVNGVTYKFNNPEEAVKFALELAKKLGMQIEFHGEQIHVE

SEQ ID NO: 1084 - protein, 43 aa, Artificial Sequence
  Synthetic
DEKVERIVEDLWKRGFSEEDIRRILQRAGVSDEQVDKALRKVI

SEQ ID NO: 1085 - protein, 43 aa, Artificial Sequence
  Synthetic
DEKIERIVEKLLRNGVSDEQIRRTLKRNGVDEREIDKVIKKVK

SEQ ID NO: 1086 - protein, 43 aa, Artificial Sequence
  Synthetic
LEEIVRIIRELQRQGVSDEEIEKILKRQGVDDRQIKKVLREVS

SEQ ID NO: 1087 - protein, 43 aa, Artificial Sequence
  Synthetic
NEEVRRLVEELLRRGVDKRQVKEILQRRGISDEEIKDALRYVG

SEQ ID NO: 1088 - protein, 43 aa, Artificial Sequence
  Synthetic
AQVDVNGVTYKFDNPEEAEKFAKKVAKKLGLTIRIKDGKWEVT

SEQ ID NO: 1089 - protein, 43 aa, Artificial Sequence
  Synthetic
REDEKRAKEAKKRANGNKDKAKEILKRLGYSEDRAEELLNRIG

SEQ ID NO: 1090 - protein, 43 aa, Artificial Sequence
  Synthetic
VKVHVDGLTYDFDTPEQAARFALKVAKEKNLRIEFHGNEIHIE

SEQ ID NO: 1091 - protein, 40 aa, Artificial Sequence
  Synthetic
SIQIHVNGTEKARKVLEQLRRDNYDVKVRVENGQYIFHIS

SEQ ID NO: 1092 - protein, 40 aa, Artificial Sequence
  Synthetic
EITVESEGEEDMRKKAEELKRRNYKVEIEVHNGKWVLHAK

SEQ ID NO: 1093 - protein, 43 aa, Artificial Sequence
  Synthetic
SEEAKKLVEELKRRGVDDKEIVEILKKLGVSEEEAKRIVREVL

SEQ ID NO: 1094 - protein, 43 aa, Artificial Sequence
  Synthetic
LDEIKKIVERLLRNGVSPDEIKEYLERQGVDPRQVDRVIREVK

SEQ ID NO: 1095 - protein, 40 aa, Artificial Sequence
  Synthetic
TTELRFTDKRQATTAAEEWRRRGYTVTYTEENGTFRVRFD

SEQ ID NO: 1096 - protein, 43 aa, Artificial Sequence
  Synthetic
TTVKVNGQKYTFPNPEEAKKFAKKYAKKYNLTVEVHGDTIKVE

SEQ ID NO: 1097 - protein, 40 aa, Artificial Sequence
  Synthetic
DETYTMEGEEQVKRLIKYAKANNLEVHVEIHNGQFIITLS

SEQ ID NO: 1098 - protein, 43 aa, Artificial Sequence
  Synthetic
REVHIGNVTYHFDNPEEAYKFAVEMAKKLNLQVHFHGETVKVE

SEQ ID NO: 1099 - protein, 43 aa, Artificial Sequence
  Synthetic
AQVDVDGLTYTFSSLEEAKRFALKVARSKNLRIEFHGETIKIE

SEQ ID NO: 1100 - protein, 43 aa, Artificial Sequence
  Synthetic
NTVHVGNVTYTFDTPEQLYRFAVKIAKDLNLRVEFHGNTVRVE

SEQ ID NO: 1101 - protein, 43 aa, Artificial Sequence
  Synthetic
DERVKKKVKDLFDKGVDPREITEELKRQGVDEEEVRRILKKLS

SEQ ID NO: 1102 - protein, 43 aa, Artificial Sequence
  Synthetic
DENEKRAKEIAKELGVDPEIVKEALKRAGGDEDKAKEIVKRLL

SEQ ID NO: 1103 - protein, 43 aa, Artificial Sequence
  Synthetic
VTVEVNGVEYHFDNPEQADKFAKKLAKENNLRLEYHGDKIKVE

SEQ ID NO: 1104 - protein, 43 aa, Artificial Sequence
  Synthetic
ITVHVGNVTYHFDEPEQALKFALEVARKQNLRLEVHNGEYHIE

SEQ ID NO: 1105 - protein, 43 aa, Artificial Sequence
  Synthetic
QSEEAKERAKEAIKRGNEDKARELLERAGLSTEEADRFIKKVK

SEQ ID NO: 1106 - protein, 43 aa, Artificial Sequence
  Synthetic
PEEIEKQVKRLLENGVDDEQIKKELKRQGVSEEEVDRIIKKVK

SEQ ID NO: 1107 - protein, 40 aa, Artificial Sequence
  Synthetic
RMTFTYEGTEAADKARKHWEAMNYRVEVHVENGKYILHVD

SEQ ID NO: 1108 - protein, 43 aa, Artificial Sequence
  Synthetic
EPELERYAKEARKNGKSPEQLEEELQRLGVSQDEAERLVKIAF

SEQ ID NO: 1109 - protein, 40 aa, Artificial Sequence
  Synthetic
SITMEFEGEEAMKKAMKMLKDRNLDVKVEVKNGRYVLHAS

SEQ ID NO: 1110 - protein, 43 aa, Artificial Sequence
  Synthetic
PEEVKRIIEELRRRGVSDEQIEEILRRQGVDEREVEEAKKLVV

SEQ ID NO: 1111 - protein, 43 aa, Artificial Sequence
  Synthetic
SDREEELVWRAYKKGEPITINGRTYSPTSPEAHRIFEEYNRKK

SEQ ID NO: 1112 - protein, 43 aa, Artificial Sequence
  Synthetic
DQREIKEQIKKARRNGDKDRVEELLRRLGVSPEQIEDILRKVS

SEQ ID NO: 1113 - protein, 43 aa, Artificial Sequence
  Synthetic
TEELEKRARELKRNGVDPREVAKIVKRLGADDKEVEDILRKLS

SEQ ID NO: 1114 - protein, 43 aa, Artificial Sequence
  Synthetic
DEELERIKRELERQGVNYQEIEEKLRRNGVDEDQIKKILKRIA

SEQ ID NO: 1115 - protein, 43 aa, Artificial Sequence
  Synthetic
EPRLQKYAQELLKKGVSESKIEKLLQSLGVTPDEAQEIIRQAR

SEQ ID NO: 1116 - protein, 43 aa, Artificial Sequence
  Synthetic
KTVDMNGVKFTFDGPEVVYKWAVEVARKLNLTVKIKDGRVEVE

SEQ ID NO: 1117 - protein, 43 aa, Artificial Sequence
  Synthetic
ATVKMGNLTWHFENPEEAKKFALEVAKKKNGRVEIHNGTFQIK

SEQ ID NO: 1118 - protein, 43 aa, Artificial Sequence
  Synthetic
QTVKINGVQYDFPNPEEARKFAEKMAKKLGLRVELHNGTYHVE

SEQ ID NO: 1119 - protein, 43 aa, Artificial Sequence
  Synthetic
DERVEKIVRELKKNGVDPRQIVKILQRQGVDPREVEDIVRRLS

SEQ ID NO: 1120 - protein, 43 aa, Artificial Sequence
  Synthetic
RQKAKELAEELQKRNVSPDEIRKILQKAGISDEDIERALEYIK

SEQ ID NO: 1121 - protein, 43 aa, Artificial Sequence
  Synthetic
DEEVEKIVKDLKRRGVSDEEIKQILQRHGVSDEEVERVIKKVK

SEQ ID NO: 1122 - protein, 43 aa, Artificial Sequence
  Synthetic
VTVHVGNVTYHFNNPEEAVKFALEMAKKLNLEVRFHGNTIKVK

SEQ ID NO: 1123 - protein, 43 aa, Artificial Sequence
  Synthetic
PEEVKRIWEELQRRGVSPDQIREYLQKRGFSDEEIEEAKDLVS

SEQ ID NO: 1124 - protein, 43 aa, Artificial Sequence
  Synthetic
GQVHVNGVTYHFSSLEEAKKFALEVAKKLGAQVEFRGETIHVE

SEQ ID NO: 1125 - protein, 40 aa, Artificial Sequence
  Synthetic
TTTYTFTDKEEARRAKEEWLKRGYTVEVTSSNGEFRVTVK

SEQ ID NO: 1126 - protein, 43 aa, Artificial Sequence
  Synthetic
DEEIKKHAEKLLRNGVSDEEIERILRRNNVDDDQIRKVKEYLK

SEQ ID NO: 1127 - protein, 43 aa, Artificial Sequence
  Synthetic
TPDELKKKAKKAFKNGNEELAEKLLQKAGIDPDKAQEILRQLR

SEQ ID NO: 1128 - protein, 43 aa, Artificial Sequence
  Synthetic
ATVHVGNVTYTFDKLEEAEKFARKMAKELGLEVRMHGNTMRVE

SEQ ID NO: 1129 - protein, 40 aa, Artificial Sequence
  Synthetic
SIHIEVEGDEAMRRVEEWAKKANLEFEVQVHNGKWIIQID

SEQ ID NO: 1130 - protein, 43 aa, Artificial Sequence
  Synthetic
TFVEFNGKKVEYPTPEAAEKAAKKLAKKLNLKVTKKNGNYKLE

SEQ ID NO: 1131 - protein, 43 aa, Artificial Sequence
  Synthetic
PREQLEREARRLAKEGNKEEARRLLEEAGFSEDEAKKIVKEAK

SEQ ID NO: 1132 - protein, 40 aa, Artificial Sequence
  Synthetic
TQKVKVDDEQKARELAKKYKKKGLDVQVQKHNGQWTLHIN

SEQ ID NO: 1133 - protein, 43 aa, Artificial Sequence
  Synthetic
DQREIQRKIDEAVKNKDSERIEKLLKKKGVSDEQVKKILRRLL

SEQ ID NO: 1134 - protein, 43 aa, Artificial Sequence
  Synthetic
MEELEREVHELLKNGVDPRQVEEELKRRGIDPKEVKRIVRRAS

SEQ ID NO: 1135 - protein, 43 aa, Artificial Sequence
  Synthetic
DEKIKRLVERLLRNGVSPEEVTEQLKREGADEREVRKVIRDIL

SEQ ID NO: 1136 - protein, 43 aa, Artificial Sequence
  Synthetic
QTVKVGNETYHFPNPEEAKKFAQKLAEKLNLKVEIHGNTIHVK

SEQ ID NO: 1137 - protein, 40 aa, Artificial Sequence
  Synthetic
ETEVTLTDKREAERLAEELRRRGLTATITDDNGTWRVRFD

SEQ ID NO: 1138 - protein, 43 aa, Artificial Sequence
  Synthetic
PEEVERIVKELVRRGVDKEQIKEILKRQGVDPREVERAVEKAT

SEQ ID NO: 1139 - protein, 43 aa, Artificial Sequence
  Synthetic
ATVHLNGLTYHFDKPEQAYKFALEMAKKLGLQLHVHGDTLRVE

SEQ ID NO: 1140 - protein, 40 aa, Artificial Sequence
  Synthetic
SETYTVQGEEQLKHIIEMAKRRNYRVEVHEKNGQYVIHLK

SEQ ID NO: 1141 - protein, 43 aa, Artificial Sequence
  Synthetic
DDEVKDKIRKLLENGVDDRQIVEILKRQGIDEERVKELVKEVK

SEQ ID NO: 1142 - protein, 43 aa, Artificial Sequence
  Synthetic
DIETRLRLLEKALRDNQPVTVDGQTYTTPEEIKKVIEELRKRK

SEQ ID NO: 1143 - protein, 43 aa, Artificial Sequence
  Synthetic
ATVHVNGVTYTFDNPEEAKEFAVKMAQKLGLQVTVHGEEYRVE

SEQ ID NO: 1144 - protein, 43 aa, Artificial Sequence
  Synthetic
TTVTVNGVTYHFDNPEEAEKFAKKIAKELGLQLELHGDQYRVE

SEQ ID NO: 1145 - protein, 43 aa, Artificial Sequence
  Synthetic
DERLEEHAERLLRNGVDEEQIKEILRRNGVDPREVEEIIKKLR

SEQ ID NO: 1146 - protein, 43 aa, Artificial Sequence
  Synthetic
ITVEVNGVQYDFPNPEEAKKFVKKVAETLGLKVEFHGNKIRIE

SEQ ID NO: 1147 - protein, 43 aa, Artificial Sequence
  Synthetic
SEEVEEIVERLLRNNVSKEEIRKILQKRGISDEEVRKAIEKVM

SEQ ID NO: 1148 - protein, 43 aa, Artificial Sequence
  Synthetic
TKVENNGKTYTFPSAEAAQKWAKKVAKKLGLTVEIDGNTIHIR

SEQ ID NO: 1149 - protein, 40 aa, Artificial Sequence
  Synthetic
EIDVEYEGEENMRKALEEAKRRNLEVEIQIHGNRWVLTFR

SEQ ID NO: 1150 - protein, 43 aa, Artificial Sequence
  Synthetic
AEVHINGVTYKFSSPEQAKEFAKRMAEKLNLKVEIHGETIKVE

SEQ ID NO: 1151 - protein, 43 aa, Artificial Sequence
  Synthetic
TTVHLGNVTYHFDNPEKAYKFAKEVAEKLNLTVRIKDGTVEVE

SEQ ID NO: 1152 - protein, 43 aa, Artificial Sequence
  Synthetic
ETVHIGNETYKFPTQEAAIKWAQKYAKKYGLTVEVHGTTVTVE

SEQ ID NO: 1153 - protein, 43 aa, Artificial Sequence
  Synthetic
KTVHVENYTFHFNNPEEAKEFALKMAKKLGLKVEFHGDTIKIE

SEQ ID NO: 1154 - protein, 43 aa, Artificial Sequence
  Synthetic
SKEEAKKRAEELLKEGNEDEARKALKEAGVNPEEVEKAIQKLK

SEQ ID NO: 1155 - protein, 43 aa, Artificial Sequence
  Synthetic
DEELTKEVRKLLRNGVDEEQVKEILKRQGVDDKEVEEVVRKAK

SEQ ID NO: 1156 - protein, 43 aa, Artificial Sequence
  Synthetic
MTVDVDGVTYHFPSPEEAYKFAVKMAKEKNGTFELHNGRIHIE

SEQ ID NO: 1157 - protein, 43 aa, Artificial Sequence
  Synthetic
TTVHLGNLTFHFDTPEAAQKAAKKLAKIYNATVYIDGDRIEVH

SEQ ID NO: 1158 - protein, 43 aa, Artificial Sequence
  Synthetic
DEEAKKIFERLQRNGVDDRQVKRILQRLGVSDEEIEKIEKEVS

SEQ ID NO: 1159 - protein, 43 aa, Artificial Sequence
  Synthetic
PSEEWKRRADKALKNGDPETARKALKNAGLSEDQAEEYLRKKG

SEQ ID NO: 1160 - protein, 43 aa, Artificial Sequence
  Synthetic
REDEAKKKAEELLRRGNEDKARKLLKKAGFSEDWARKWIKKAL

SEQ ID NO: 1161 - protein, 43 aa, Artificial Sequence
  Synthetic
ITVHVGNTTYHFDTPEQADKFAKRMAKELNLKIEHHGNTIRVE

SEQ ID NO: 1162 - protein, 43 aa, Artificial Sequence
  Synthetic
PEEVEKRARQLYKEGVDPRQIREWLKKAGLSDEEVEEIVRRVA

SEQ ID NO: 1163 - protein, 43 aa, Artificial Sequence
  Synthetic
TTVHVDNYTYHFDNPEEAKKFVERVVKEKGGTVEVHGNTWHIE

SEQ ID NO: 1164 - protein, 40 aa, Artificial Sequence
  Synthetic
SIEIEVEGEEQMKRVVEEAQRKNLEYHVRVENGRWVIEIS

SEQ ID NO: 1165 - protein, 43 aa, Artificial Sequence
  Synthetic
SPEEAKKLLKEAKNGATTVTYNGTTFTFDTAEAALKFAKKLYK

SEQ ID NO: 1166 - protein, 40 aa, Artificial Sequence
  Synthetic
TETRTFTDEREARKAEEEARRRGLRVQVEKHGTTWKVKID

SEQ ID NO: 1167 - protein, 43 aa, Artificial Sequence
  Synthetic
RDLERLAEELLKKANGDEDWVKEYLKSAGVDPEEAEKLIKAAK

SEQ ID NO: 1168 - protein, 43 aa, Artificial Sequence
  Synthetic
ATVHVGNVTYHFPSLEEAKKFAERLAKELNLKMEIHGNTIHVE

SEQ ID NO: 1169 - protein, 43 aa, Artificial Sequence
  Synthetic
GTVHVGDKTYHFPTPDAAKKFAQEIAKKLNLQVTVKNGTWQVH

SEQ ID NO: 1170 - protein, 43 aa, Artificial Sequence
  Synthetic
VTVDVQGLEYHFDNPEQAKRFAKEMAKKLGLEVHFHGNRIRIE

SEQ ID NO: 1171 - protein, 43 aa, Artificial Sequence
  Synthetic
PDSKKRVHKIAKKLGIDPDLAEKAWKKANGNEEKAERILRKIY

SEQ ID NO: 1172 - protein, 40 aa, Artificial Sequence
  Synthetic
SIDFELEGEEQMKKMVEIARRQNLDVEVQKHGDKWVVRID

SEQ ID NO: 1173 - protein, 43 aa, Artificial Sequence
  Synthetic
SEEETEKRVRKALKEGNRDKAEEIARRANSDKAKQIVKDWEKG

SEQ ID NO: 1174 - protein, 43 aa, Artificial Sequence
  Synthetic
MQVEVNGLTYTFDNPEQAVEFAQRMAKKLGGTFTLKDGTLHVT

SEQ ID NO: 1175 - protein, 43 aa, Artificial Sequence
  Synthetic
TKVTINGKTLTFNNLDEARKWAKEYAKKKNLTVHIDGKTITVK

SEQ ID NO: 1176 - protein, 40 aa, Artificial Sequence
  Synthetic
EVHFESHGEEQAMRVVKMLKKRNLTVEVKVENNKWIITAK

SEQ ID NO: 1177 - protein, 40 aa, Artificial Sequence
  Synthetic
QETYTVDGEEKAKKLIEHLKRRNLEVHVEIHNGKFIITAD

SEQ ID NO: 1178 - protein, 40 aa, Artificial Sequence
  Synthetic
EIHIRTNGEEQARKVYKMLAKRNYDVKIEQHNGQWVVTAS

SEQ ID NO: 1179 - protein, 43 aa, Artificial Sequence
  Synthetic
DKEEYKKKVEEVVRNGDPDRAREILRRAGISEEEIEKIIKRVL

SEQ ID NO: 1180 - protein, 43 aa, Artificial Sequence
  Synthetic
AQVHVNGYTYHFETLEQMVEFALKIAKKLGLRIEFHGETVHIE

SEQ ID NO: 1181 - protein, 43 aa, Artificial Sequence
  Synthetic
DKRVEDIVRELVRRGVDKRQISEILKRQGVDDEQIKEALKRAT

SEQ ID NO: 1182 - protein, 43 aa, Artificial Sequence
  Synthetic
GTVKLGDIELHYPNPELAQKAAEALAKKYNLTVEKHNGTFHIK

SEQ ID NO: 1183 - protein, 43 aa, Artificial Sequence
  Synthetic
DEKVEKIFKKLIDSGVSDEQVRRILQRQGVDDRLIEEAERRVK

SEQ ID NO: 1184 - protein, 43 aa, Artificial Sequence
  Synthetic
EEEIRKEIKKLRDNGVDDEQIKEILRRKGVDPRQVDKVIREVK

SEQ ID NO: 1185 - protein, 43 aa, Artificial Sequence
  Synthetic
DEELQKTVERLKRNGVSKEQIKEILKRQGVSDEQVDRIIKQVG

SEQ ID NO: 1186 - protein, 43 aa, Artificial Sequence
  Synthetic
DKKVEDIVKDLQRKNVSPEEIKEILRRNGVDEEEIKKVLRKVS

SEQ ID NO: 1187 - protein, 43 aa, Artificial Sequence
  Synthetic
GTVHVGNTTYTFDNPEKAYKFALELAKKLGLQVTVKNGTVKIH

SEQ ID NO: 1188 - protein, 43 aa, Artificial Sequence
  Synthetic
SEKIEKTIERLLKNGVDPEQVKKILKRNGADERQVKEVLERIK

SEQ ID NO: 1189 - protein, 43 aa, Artificial Sequence
  Synthetic
AQVHIGNVTYHFDNPEQAEKFAKEMAKRLGRQVEIHGEQFKVE

SEQ ID NO: 1190 - protein, 43 aa, Artificial Sequence
  Synthetic
TTVHVDGVEYRFNNPEEVKQFVERVVKEKGGTVEWHGEEVHIK

SEQ ID NO: 1191 - protein, 43 aa, Artificial Sequence
  Synthetic
PSEEDIIKKLARELNVDERLVREALKRANGDEDKVREIVKKLK

SEQ ID NO: 1192 - protein, 43 aa, Artificial Sequence
  Synthetic
ATVHVNGVQYDFSSPEQAKKFAERMAKELGLEVRMKDGHFRVE

SEQ ID NO: 1193 - protein, 43 aa, Artificial Sequence
  Synthetic
KTVKVGDIEITFPTEELAKKYAQKLAKKYNLELQLHNGTWKLH

SEQ ID NO: 1194 - protein, 43 aa, Artificial Sequence
  Synthetic
SPDLQELVRQLLKNGVSPEEIEEILKKAGVSPDEAQQLIEEAK

SEQ ID NO: 1195 - protein, 43 aa, Artificial Sequence
  Synthetic
DEEDEVRKEVAKLLNVSEEEVKEIARRLGLDLKQLLDKVRKDN

SEQ ID NO: 1196 - protein, 40 aa, Artificial Sequence
  Synthetic
EETKTVQGEEALKKAEEEARRRNLKLEVHIHGDKIIITLK

SEQ ID NO: 1197 - protein, 43 aa, Artificial Sequence
  Synthetic
SQEEAKKEAEKALRNGNEDRAREILKSAGVSPEEAERILQKLK

SEQ ID NO: 1198 - protein, 43 aa, Artificial Sequence
  Synthetic
IQVHIGNVTYHFDNPEKALKFVKEVAKKLGLQVHIHGNTIKVE

SEQ ID NO: 1199 - protein, 43 aa, Artificial Sequence
  Synthetic
TKDDLREKAKQLAKDGNEDEAERLLKEIGFSPQEAKEFVKKAS

SEQ ID NO: 1200 - protein, 43 aa, Artificial Sequence
  Synthetic
PTEEAKKRIQKAFQNGNEDLAEKLAREANLSEDDLRQLQEEAK

SEQ ID NO: 1201 - protein, 43 aa, Artificial Sequence [sequence omitted]

SEQ ID NO: 1202 - protein, 43 aa, Artificial Sequence
  Synthetic
IEDVEKEVRKLLQNGVDPEQVVEILKRKGVDEDQVREVIKRLT

SEQ ID NO: 1203 - protein, 43 aa, Artificial Sequence
  Synthetic
PRDEAEKKAEKALRNGNEDKARQALRDAGITEDEVERIIRELK

SEQ ID NO: 1204 - protein, 43 aa, Artificial Sequence
  Synthetic
KTVHINGVTYHFDEPEQAKKFALRLAKELNLQVEFHGDEIRVE

SEQ ID NO: 1205 - protein, 43 aa, Artificial Sequence
  Synthetic
QDEERKEVERLIKNGSSPEEAKRWLKKRGVSEDEAEQIVREAI

SEQ ID NO: 1206 - protein, 43 aa, Artificial Sequence
  Synthetic
MEEAKRVVERLLRNGVDDEQVKEILRRLGVDPREVDELVKKVK

SEQ ID NO: 1207 - protein, 43 aa, Artificial Sequence
  Synthetic
LEEVERRVRQLVDDGVDDEQVKEILKRLGVDDDQVRKIIEKVK

SEQ ID NO: 1208 - protein, 43 aa, Artificial Sequence
  Synthetic
SKDELEKRAREAWKNGNKDKARELFSRAGYSPEQADKWLKKLE

SEQ ID NO: 1209 - protein, 40 aa, Artificial Sequence
  Synthetic
SIDVTVEGEEKARKVAKMLAKRNLEVHIRKENGKWIIHAE

SEQ ID NO: 1210 - protein, 43 aa, Artificial Sequence
  Synthetic
ATVEFNGLQYHFENPEKAKEFAERVARKLNLTVTVHGDTIKIE

SEQ ID NO: 1211 - protein, 40 aa, Artificial Sequence
  Synthetic
ELRFEVEGEEKAIKIAQELKKQNLDVKIRVENGRWIIEAS

SEQ ID NO: 1212 - protein, 43 aa, Artificial Sequence
  Synthetic
KTVHWGGLTFHFNNPEQVKKFVERVVKELGLTVQFDGDTVQIE

SEQ ID NO: 1213 - protein, 43 aa, Artificial Sequence
  Synthetic
PEEIEKLIRDLLRKGVDPRQVKEIVKRRGANEEKVEEILQRVG

SEQ ID NO: 1214 - protein, 43 aa, Artificial Sequence
  Synthetic
DSDELKEKAKEAVKNGDEERVERLLRRAGVSEEQIKEFKKRVL

SEQ ID NO: 1215 - protein, 43 aa, Artificial Sequence
  Synthetic
QEDELKKKAKKAVESGNREKAKEILKRAGYSEKEAEDIVRKLD

SEQ ID NO: 1216 - protein, 43 aa, Artificial Sequence
  Synthetic
PEEVKRVIEDLLRKGVSPEQVTRIAKRYGASEEFVKRVIREVG

SEQ ID NO: 1217 - protein, 43 aa, Artificial Sequence
  Synthetic
AEEVAKLIRELRKKGVSEEEVDEILKRNGVNPEQIKEAKKIVD

SEQ ID NO: 1218 - protein, 40 aa, Artificial Sequence
  Synthetic
AETVTVEGTEAMLKIIEMAKKRNLRVEVQQHGDKYILTLK

SEQ ID NO: 1219 - protein, 43 aa, Artificial Sequence
  Synthetic
ATVHVNGMTFHFPNPEEAKKFAKEIAKKLGLQVEVHGNELHVE

SEQ ID NO: 1220 - protein, 43 aa, Artificial Sequence
  Synthetic
EERLEREVRKLVENGVSDEEIKRILKRQGVSDEEVDKIVKKAK

SEQ ID NO: 1221 - protein, 43 aa, Artificial Sequence
  Synthetic
PDKAEKILREALKRGYSPEQAVEIAKRAGITEEEARRILKEIL

SEQ ID NO: 1222 - protein, 43 aa, Artificial Sequence
  Synthetic
IQVTWNGVTVTFDNPEEAEKYAKKIAKEYQGEVRVKDGRWEIH

SEQ ID NO: 1223 - protein, 43 aa, Artificial Sequence
  Synthetic
SQDLKDKFEQLVRDGVSEDEANEILKRDGVSEQEIREILNWFR

SEQ ID NO: 1224 - protein, 43 aa, Artificial Sequence
  Synthetic
TTVHIGNETYHFDDPTEARKFAQEMAKKLNLQVHEHGDDIKVE

SEQ ID NO: 1225 - protein, 43 aa, Artificial Sequence
  Synthetic
VEERKKIKEALRRGEISEDQVRELLKRLGVDPKEVEEIVQRVS

SEQ ID NO: 1226 - protein, 43 aa, Artificial Sequence
  Synthetic
ITVDVQGVKYTFNNPEEVKKFAKKVAEELGLEVHFHGEEVRVE

SEQ ID NO: 1227 - protein, 43 aa, Artificial Sequence
  Synthetic
DEEKLKEEVKEAQKNKDEERVEKLLRRLGVDEEQIKEILKKAS

SEQ ID NO: 1228 - protein, 43 aa, Artificial Sequence
  Synthetic
PEEIEKEVRRLLQNGVDERQVKDRLRRNGVDPREVEKVLRKLS

SEQ ID NO: 1229 - protein, 43 aa, Artificial Sequence
  Synthetic
VTVHVGNVTYHFDNPEEAVKFALKIAKELGLKVEIHGNELHVE

SEQ ID NO: 1230 - protein, 43 aa, Artificial Sequence
  Synthetic
LTVHMQGITYTFDNPEKAKKFAKKVAKEAGLRVEIHGNTIHIE

SEQ ID NO: 1231 - protein, 43 aa, Artificial Sequence
  Synthetic
QTLHVNGVQYHFPNPEEAYKFAKEMAEKLGRQLKVENGTWKVE

SEQ ID NO: 1232 - protein, 43 aa, Artificial Sequence
  Synthetic
QDDARKKAQELYDRGVSWDQIQEWLKRQGNDDAAKWAEKEKKK

SEQ ID NO: 1233 - protein, 43 aa, Artificial Sequence
  Synthetic
ATVEVQGMKYEFSSPEEAEKFAKEMAKKLNLQVTVHGDKWRVE

SEQ ID NO: 1234 - protein, 43 aa, Artificial Sequence
  Synthetic
QTVDINGVQYDFPNPEEAKKFALEMAKKLGLQVHMNGDHITVR

SEQ ID NO: 1235 - protein, 43 aa, Artificial Sequence
  Synthetic
KEEVKKVLEAAKRGEISEEDLERILKRLGVDPREVEDLKRQVS

SEQ ID NO: 1236 - protein, 40 aa, Artificial Sequence
  Synthetic
EIQIETEGEEDARRILKEVKKRNLTAEIEVHNGKFIIRVS

SEQ ID NO: 1237 - protein, 43 aa, Artificial Sequence
  Synthetic
TTVHIGNVTYHFDNPEEARKFAEEMAKKLGLRLEVKNGHFEVK

SEQ ID NO: 1238 - protein, 43 aa, Artificial Sequence
  Synthetic
SEDAKRRLEKLVRNGVDPRDVKRVARELGVDDKQVEEIIRKVS

SEQ ID NO: 1239 - protein, 43 aa, Artificial Sequence
  Synthetic
DEEKVKREIVRALQNGDEDKVRELLRRYNIDPREVEEVLRKYS

SEQ ID NO: 1240 - protein, 43 aa, Artificial Sequence
  Synthetic
REEVDRLVERLLKNGVDERQVREILRRQGVSEEEIDRALKKVS

SEQ ID NO: 1241 - protein, 43 aa, Artificial Sequence
  Synthetic
RDEDEKEKIKEALKRGNEDKAKEIAKRANVSPEEYERLRKEAE

SEQ ID NO: 1242 - protein, 43 aa, Artificial Sequence
  Synthetic
VEEVERLIKKLLEDGVSDEQVTKIARRAGLDPREVEKVVKKYK

SEQ ID NO: 1243 - protein, 40 aa, Artificial Sequence
  Synthetic
RLTVTFNGPEKAKKFFKWAQKANLSAELRIHGDQATVHVE

SEQ ID NO: 1244 - protein, 43 aa, Artificial Sequence
  Synthetic
ATVHFNNYTVTFSSPEQAEKFAREVAKKLNLELHVKDGEFHIK

SEQ ID NO: 1245 - protein, 43 aa, Artificial Sequence
  Synthetic
PQEEVKKEVKKLVRSGNKEEARKLLQKLGIDDREVEEILRRLD

SEQ ID NO: 1246 - protein, 43 aa, Artificial Sequence
  Synthetic
PEKVRRIIDKLKKEGVSKEEIKKYLQRAGVSDEEIERVQRQVL

SEQ ID NO: 1247 - protein, 43 aa, Artificial Sequence
  Synthetic
PQDEAKKRAEEALRRGNKDKARQILKDAGYSEDEAEEILQRLG

SEQ ID NO: 1248 - protein, 40 aa, Artificial Sequence
  Synthetic
TTEKTFTDETEARRVAEEARRKGLTVRVEERNGRWTVRIE

SEQ ID NO: 1249 - protein, 40 aa, Artificial Sequence
  Synthetic
RVTYTVEGDEQMKKIVKMLRDRNLEVHYEKHNGRVIITAE

SEQ ID NO: 1250 - protein, 43 aa, Artificial Sequence
  Synthetic
AEVDVNGVKYKFSSPEQAKKFAEEVAKKLGGQVKLKDGTFKVE

SEQ ID NO: 1251 - protein, 40 aa, Artificial Sequence
  Synthetic
TTTYKFDDEKQAQEAAKKWQKQGYDVEVHKQGNWWVVNVK

SEQ ID NO: 1252 - protein, 40 aa, Artificial Sequence
  Synthetic
EITYTFDGEEQVAEMAKDMKKKNLRFEIRIENGKYVLTIK

SEQ ID NO: 1253 - protein, 43 aa, Artificial Sequence
  Synthetic
LTVHVDNYTYHFNNPEEMLKFAREVAKKKGLQIEFHNGHLHMK

SEQ ID NO: 1254 - protein, 43 aa, Artificial Sequence
  Synthetic
PEEVKKIVKRLLDQGVSPDEVREILRRQGVDEREVQEVLKKVS

SEQ ID NO: 1255 - protein, 43 aa, Artificial Sequence
  Synthetic
NEEVRKVIERLLKNGVSDDEIREILQRLGVSDEEIEKVLKRVK

SEQ ID NO: 1256 - protein, 40 aa, Artificial Sequence
  Synthetic
KMTIRVKGKELARRIAKEMKDRNLKVEIHEHGDEVILEIE

SEQ ID NO: 1257 - protein, 40 aa, Artificial Sequence
  Synthetic
RLTWTVDGEEQAKKIIEWAKKQNLEIHVETHNGKYILHAD

SEQ ID NO: 1258 - protein, 43 aa, Artificial Sequence
  Synthetic
WKVTVKGVEYTFDNPEEAKKFAEELAKKKGGQIHYKDGEFQVH

SEQ ID NO: 1259 - protein, 43 aa, Artificial Sequence
  Synthetic
TTVHLNGQQYTFDNPEEAEKWAKKVAEEIGGTFEQHGTEYHVK

SEQ ID NO: 1260 - protein, 43 aa, Artificial Sequence
  Synthetic
TRVTIGDETYTFPSIEAAYKWALELAKKLNLTITIQGNTVQVH

SEQ ID NO: 1261 - protein, 43 aa, Artificial Sequence
  Synthetic
TPEAQKVAELALQRGLSEDQLEKLAREAGISDEEIKEAKKYYR

SEQ ID NO: 1262 - protein, 43 aa, Artificial Sequence
  Synthetic
DEERAKRLEEEALRKNDEDKLKEVARLLNISDEQLKELLRRVL

SEQ ID NO: 1263 - protein, 43 aa, Artificial Sequence
  Synthetic
SEKAKKLAEQAARNGLNPDEIREWLRNLGVNPEEAERAVRWVL

SEQ ID NO: 1264 - protein, 43 aa, Artificial Sequence
  Synthetic
TDDWEKKAEKEFRKGASDEEVKKLLEKAGYSTEEAERIARKLR

SEQ ID NO: 1265 - protein, 40 aa, Artificial Sequence
  Synthetic
SFTITLEGEEKAKKLEEELKRRNYKVEIEIHNGRFVLTAK

SEQ ID NO: 1266 - protein, 43 aa, Artificial Sequence
  Synthetic
GEVHFNGETYKFPNPQEAIKFAKKVAKKYNLTVHVHGPTVKIK

SEQ ID NO: 1267 - protein, 43 aa, Artificial Sequence
  Synthetic
EEKEKLARLAVKLAGGNEEKARRIAQKLGVSPEEARRLIEEIL

SEQ ID NO: 1268 - protein, 43 aa, Artificial Sequence
  Synthetic
MTVHVGNTTYHFSDPTEAEQFAKKMAKDLNLRIERHGNTWHVE

SEQ ID NO: 1269 - protein, 40 aa, Artificial Sequence
  Synthetic
EVTLKIEGEEQAKKVVKEAKDKNLEVHYERRGNEWVITIR

SEQ ID NO: 1270 - protein, 43 aa, Artificial Sequence
  Synthetic
SSEELKKKAKKAYENGNEDKARKILEKAGLSPDQAEQFLRDLN

SEQ ID NO: 1271 - protein, 43 aa, Artificial Sequence
  Synthetic
LEEVKKQVERLKRNGVSEEQIKEVLERLGVSPEDVEKILKEVS

SEQ ID NO: 1272 - protein, 43 aa, Artificial Sequence
  Synthetic
KTVHVGNVTFHFDNPEQVKKFVQRIAKELGMTYEWHGNTVHVE

SEQ ID NO: 1273 - protein, 43 aa, Artificial Sequence
  Synthetic
QEEAEKIARRLKKHNVDQRQIKEILRRAGVSEEAVQEVVKKVL

SEQ ID NO: 1274 - protein, 43 aa, Artificial Sequence
  Synthetic
NEDEVRERIKELLKQGNEDQAREEARRAGISDKEVDKLKKKAG

SEQ ID NO: 1275 - protein, 43 aa, Artificial Sequence
  Synthetic
DEEVEKEARELKKNGVSKEEIEKILRRAGVDEEVLKEIKRKLG

SEQ ID NO: 1276 - protein, 43 aa, Artificial Sequence
  Synthetic
MEEVEKIVRELLRNGVDPRQIKEILKRQGVSDEEVKRAVEKVA

SEQ ID NO: 1277 - protein, 43 aa, Artificial Sequence
  Synthetic
SDEEAKRKVQEALKEGNEEKARRIARKAGISDEEVKELKKRVT

SEQ ID NO: 1278 - protein, 43 aa, Artificial Sequence
  Synthetic
NEEVKKILEELKRRGVDDRQVEEILRRQGISEEEIREAQRAYK

SEQ ID NO: 1279 - protein, 43 aa, Artificial Sequence
  Synthetic
SDKAKKIAEELYKRGVDPDQVKEILKKLGVSDDEADELARRLK

SEQ ID NO: 1280 - protein, 43 aa, Artificial Sequence
  Synthetic
PPDEKEKVRKLFENGASEDEAAEAFRKLGYSEEEARRFVKKIK

SEQ ID NO: 1281 - protein, 43 aa, Artificial Sequence
  Synthetic
DEKAERIFEELKRRGVDPDQVKKILQRLGVDDREVEEIEKRLE

SEQ ID NO: 1282 - protein, 43 aa, Artificial Sequence
  Synthetic
REEVDKLIKELLDRGVDEEQVVRIVKRAGADEEHVRRVVKRYS

SEQ ID NO: 1283 - protein, 43 aa, Artificial Sequence
  Synthetic
LWKKLAKKLQELVQNGVKVKVNGIKVTTEEQAKKLAKILAKEN

SEQ ID NO: 1284 - protein, 40 aa, Artificial Sequence
  Synthetic
SFHVTVHGEEQVQRMLEYAKQANLEVHVHRHGDQVILEFR

SEQ ID NO: 1285 - protein, 43 aa, Artificial Sequence
  Synthetic
TEKEKKIEEIARRAGVSPDEARKALERAGGNYDLAEEILKREK

SEQ ID NO: 1286 - protein, 43 aa, Artificial Sequence
  Synthetic
TEEELLRRFLQAQRNGDEDRVRELVRRLNLDPRQVERLVRQVE

SEQ ID NO: 1287 - protein, 43 aa, Artificial Sequence
  Synthetic
SKSEELEEALKAYRNNDEKKLQEIAKKLNVSPEELKELAQKYG

SEQ ID NO: 1288 - protein, 40 aa, Artificial Sequence
  Synthetic
AVKYEFPGQEAALEFAKEMKKRNLEVHVHVENGKWVAEVR

SEQ ID NO: 1289 - protein, 43 aa, Artificial Sequence
  Synthetic
TTVHVNGYTYHFDNPEEAKKFALEMAKRLGLEVRFHGEHIEVK

SEQ ID NO: 1290 - protein, 43 aa, Artificial Sequence
  Synthetic
ATVHVQGVEYRFPEPEQAKEFAKKMAEKLNLRIEFHGDTIHVE

SEQ ID NO: 1291 - protein, 40 aa, Artificial Sequence
  Synthetic
RETYHVHGEEAMLALVEMAKKRNLEVHWKKENNQWIVHIE

SEQ ID NO: 1292 - protein, 43 aa, Artificial Sequence
  Synthetic
MQVHVNGVTYTFSNPEEALKFAERMAKELGMEVQLHNGQIRIE

SEQ ID NO: 1293 - protein, 43 aa, Artificial Sequence
  Synthetic
TTVEFNGKKVTYPTPEAAKKAAEKWAKKLGLKVTQKNGNFKVE

SEQ ID NO: 1294 - protein, 43 aa, Artificial Sequence
  Synthetic
RPEAKKLAEDLAKNGVSDDEISEALKKAGASPEEIERLLRKIR

SEQ ID NO: 1295 - protein, 40 aa, Artificial Sequence
  Synthetic
RITITVDGTEKAKKIMEHMKKRNLDVKARVENGKWIIEVD

SEQ ID NO: 1296 - protein, 43 aa, Artificial Sequence
  Synthetic
LTVKFDGLTYHFDNPEQVKKFAKRVAEEKGLEVQLHNGEIRME

SEQ ID NO: 1297 - protein, 43 aa, Artificial Sequence
  Synthetic
EEELKKLVERLKRQGVDDKQIEKILKDQGVDDRQVEEAIRLLR

SEQ ID NO: 1298 - protein, 40 aa, Artificial Sequence
  Synthetic
EVTIEVDGEEKARKLVKIAKKQNLEVEVHQENGKWKVTFK

SEQ ID NO: 1299 - protein, 43 aa, Artificial Sequence
  Synthetic
LEEVKKIIKRLLENNVDEEQIKHIARKAGVDDEFVERVIRKIG

SEQ ID NO: 1300 - protein, 43 aa, Artificial Sequence
  Synthetic
KTVHVNGVQYDFDNPEEAYKFAVEMARKLNLTIEYHGDQIKVE

SEQ ID NO: 1301 - protein, 40 aa, Artificial Sequence
  Synthetic
SIEVHLHGEEAAKKWAEMLKRQNLEVKIEVHGDRLIIRAS

SEQ ID NO: 1302 - protein, 40 aa, Artificial Sequence
  Synthetic
TTEYTFTDDEEARRAIEELKKRGLTFRYEKHGTTWRVRVD

SEQ ID NO: 1303 - protein, 43 aa, Artificial Sequence
  Synthetic
SVEEIEKKLRELVRKGQPITIGNLTVTSEEDVEDVVKKLSKEM

SEQ ID NO: 1304 - protein, 40 aa, Artificial Sequence
  Synthetic
EVTYEVHGEEIAREIMEKAKRQNLEVHIEIRNGKFIVTIR

SEQ ID NO: 1305 - protein, 40 aa, Artificial Sequence
  Synthetic
RWEITVHGEEQAKKVIKMLKDRNLEVHVEHHGDQVVITAE

SEQ ID NO: 1306 - protein, 43 aa, Artificial Sequence
  Synthetic
VQVHVDGLTYDFDNPEEAKRFAKEMAKKKGGRVEIHGNHIHVK

SEQ ID NO: 1307 - protein, 43 aa, Artificial Sequence
  Synthetic
TTIEWNGTKITVDNPQKAKELAKKIAKKLGLTVKVHGNTITIE

SEQ ID NO: 1308 - protein, 43 aa, Artificial Sequence
  Synthetic
REEDARRTAKKLLQKGNEDKAREVLKRAGVDPEEADRIVRKFL

SEQ ID NO: 1309 - protein, 43 aa, Artificial Sequence
  Synthetic
TTVHVDGVQYDFSSLEQVLRFVRKMAKEQGLQVEVKNGQFEVH

SEQ ID NO: 1310 - protein, 43 aa, Artificial Sequence
  Synthetic
ATVHVNGVQYHFDNPEQAEEFARKIAKKQNLTVEFRGDTIHVE

SEQ ID NO: 1311 - protein, 43 aa, Artificial Sequence
  Synthetic
PEELKKTAERLLRNGVSDEELKEYLKKLGVSEEEVQKVLKAVK

SEQ ID NO: 1312 - protein, 43 aa, Artificial Sequence
  Synthetic
TTVHVNGEEYTFPSPDEAKKFAKKYAKKQGLTVHVDGNKVTIK

SEQ ID NO: 1313 - protein, 43 aa, Artificial Sequence
  Synthetic
DEIEKIIRELAKKLGLSPEQVAEWVEKQGDEKQAEEIKRFLRS

SEQ ID NO: 1314 - protein, 43 aa, Artificial Sequence
  Synthetic
TTVIVGDTTYTFDTPEKAYQYAKKIAKKLGKKVQIHNGKVKVT

SEQ ID NO: 1315 - protein, 43 aa, Artificial Sequence
  Synthetic
GTVHIGNTTYKFPSTDEAIKFAQKYAKKYNLKVHVHGPKVKVT

SEQ ID NO: 1316 - protein, 43 aa, Artificial Sequence
  Synthetic
TEKARKIAEELLKRGVSDDEIREILQREGFSPDEAEEAIQRAK

SEQ ID NO: 1317 - protein, 43 aa, Artificial Sequence [sequence omitted]

SEQ ID NO: 1318 - protein, 43 aa, Artificial Sequence
  Synthetic
KEEVKKHVEKLVRNGVSDEQIKKILKELGVDDRQVEKIIRDVR

SEQ ID NO: 1319 - protein, 40 aa, Artificial Sequence
  Synthetic
SQTQRTQDENEARRIAEEWKRRGYDVEVRNRNGHWEVTWD

SEQ ID NO: 1320 - protein, 43 aa, Artificial Sequence
  Synthetic
KTVTVNGVDYTFDNPEQALKFALEMAKKLNLQIEFHGDHIRVE

SEQ ID NO: 1321 - protein, 43 aa, Artificial Sequence
  Synthetic
ATVHVNGVTYHFDNPEEAKEFALRMAQSLNLRLEIHGDELHVE

SEQ ID NO: 1322 - protein, 43 aa, Artificial Sequence
  Synthetic
DEKVEEIVEKLVKNGVSEEQIRKYLKDQGVDPREIDKAVRKAW

SEQ ID NO: 1323 - protein, 43 aa, Artificial Sequence
  Synthetic
DEEEKKILERLVRSGVDKEQIEEIARKLGIDPRLVDEVYKKVS

SEQ ID NO: 1324 - protein, 40 aa, Artificial Sequence
  Synthetic
SITIRVRGEEQAKKVIKWALDQNLEVKVQKHGDEYIITAD

SEQ ID NO: 1325 - protein, 43 aa, Artificial Sequence
  Synthetic
LEEEVKEKVKELVRKGDEDRAKEVLKRAGFDEEQVKKIVKDLM

SEQ ID NO: 1326 - protein, 43 aa, Artificial Sequence
  Synthetic
QDEVREIVRKLKEEGVSKEQIKEILKRNGVDPRVVRRVIEELG

SEQ ID NO: 1327 - protein, 43 aa, Artificial Sequence
  Synthetic
PEDLEDLARRLYENGVDREQIKEFLKRAGVSDEEVEKVVKKVA

SEQ ID NO: 1328 - protein, 43 aa, Artificial Sequence
  Synthetic
TTIHVDGVEYRFDNPEEVKEFVRKMVESKGGRVEFHGEEIRIE

SEQ ID NO: 1329 - protein, 40 aa, Artificial Sequence
  Synthetic
TKHFTVTDSREARKWEEWARQQGLEWRVEERNGTWRVEIR

SEQ ID NO: 1330 - protein, 43 aa, Artificial Sequence
  Synthetic
TDVEKAVEEALKKANGNTDKAKEVAKELGVSPDEFEELYQKLK

SEQ ID NO: 1331 - protein, 43 aa, Artificial Sequence
  Synthetic
QQVDVNGVTYTFDNPEEVKKFVARIAKELNLKVEWHGDKVRIE

SEQ ID NO: 1332 - protein, 43 aa, Artificial Sequence
  Synthetic
STEELKKKLEEAIRQGNADLVRELAQRIGLSDEEAEKLAQKAK

SEQ ID NO: 1333 - protein, 43 aa, Artificial Sequence
  Synthetic
RPEATDLARKLLKNGISEDEIREILKSLGLSEDEAEEAIQRAK

SEQ ID NO: 1334 - protein, 43 aa, Artificial Sequence
  Synthetic
DEREIVKRVKKLLERGDQEEIQRLAKELNVDEEQLEKIVRKVD

SEQ ID NO: 1335 - protein, 43 aa, Artificial Sequence
  Synthetic
SDESERVRKLAQKIGGNAEKIAKELLQRGQDPKEVEKILRKIR

SEQ ID NO: 1336 - protein, 43 aa, Artificial Sequence
  Synthetic
PELLKKLKEEIERKQLSPDQAEKIAKELGLSPEAVEQARQFAA

SEQ ID NO: 1337 - protein, 43 aa, Artificial Sequence
  Synthetic
LEVDIKGVKYTFNNPEEAEKFAREMAKKLGGQVKMKDGTFKVE

SEQ ID NO: 1338 - protein, 43 aa, Artificial Sequence
  Synthetic
RDEVTKIVQELLDQGISPDQIREILQRKGVSDEEVERALRRVV

SEQ ID NO: 1339 - protein, 43 aa, Artificial Sequence
  Synthetic
SDEVRKRIEKLLRNGVDERQVEEILKRLGVDPDQVEKLIKEVK

SEQ ID NO: 1340 - protein, 43 aa, Artificial Sequence
  Synthetic
KTVDVNGVRYHFDNPEQAKEFAKKVAEKLNLKVEFHGDTIKVE

SEQ ID NO: 1341 - protein, 40 aa, Artificial Sequence
  Synthetic
SYQFHVDGDEKAKRVYKMLANMNLDVKIRVENGQWIIKAD

SEQ ID NO: 1342 - protein, 43 aa, Artificial Sequence
  Synthetic
SEDEKRARELLKRAGLSPEQIEKVWKKAGNPEKAEEIARRLQS

SEQ ID NO: 1343 - protein, 43 aa, Artificial Sequence
  Synthetic
LEKLQREAEELRKRGVDREQIKEILKRKGVSDEEVKKVVDYVS

SEQ ID NO: 1344 - protein, 43 aa, Artificial Sequence
  Synthetic
PDEVAKQVKELKKQGVSKDQVDEFLRRYGLSDDEVEEVKRKVG

SEQ ID NO: 1345 - protein, 43 aa, Artificial Sequence
  Synthetic
TEEVEEIVDRLKKNGVDKEQVKEILQRNGVSDEEVKRVLRKIG

SEQ ID NO: 1346 - protein, 43 aa, Artificial Sequence
  Synthetic
SKVKVGDQTYEFDSLQAAQEYAKKYAKKKNLTVHVDGNTITVE

SEQ ID NO: 1347 - protein, 43 aa, Artificial Sequence
  Synthetic
LTVHVNGLTYHFDSPEKVEKFAKRVAKELGMQLKVENGTFHIQ

SEQ ID NO: 1348 - protein, 43 aa, Artificial Sequence
  Synthetic
AQVDVKGVTYKFQSLEQAKRFAKEVAEKLGGQVHMKDGTFEVK

SEQ ID NO: 1349 - protein, 43 aa, Artificial Sequence
  Synthetic
DEELKKHVKRLYENGVDDEQIKEIVRRLGYDDESAERAIRYAK

SEQ ID NO: 1350 - protein, 40 aa, Artificial Sequence
  Synthetic
EKTVTFNGEEAAKKFLEEMKRRNLRAEIEIHNGQWVVTVK

SEQ ID NO: 1351 - protein, 40 aa, Artificial Sequence
  Synthetic
KFTVHSEGDEQMKKWVEYAKKANLEVHYEKRGNRWVLHIE

SEQ ID NO: 1352 - protein, 40 aa, Artificial Sequence
  Synthetic
RITVESHGEEDAKRIAQHFKARNLEVHVEVHNGKWVIQID

SEQ ID NO: 1353 - protein, 43 aa, Artificial Sequence
  Synthetic
PEDVRRLVKEVRKKGLNEEQIRKDLKRQGIDPRKVEQVVRLVG

SEQ ID NO: 1354 - protein, 43 aa, Artificial Sequence
  Synthetic
SDKEKEVKERFKRGEVSPDEAKELLKRIGVDEDKAEEIVRRLA

SEQ ID NO: 1355 - protein, 43 aa, Artificial Sequence
  Synthetic
TTVEFDGYQYHFDNPEQAKKFAAEVAKKLNREVHLHGDTIQIK

SEQ ID NO: 1356 - protein, 43 aa, Artificial Sequence
  Synthetic
KQVDVNNVTYTFSNPEEAEKFAREMAKKLGLQLHIKGDKFEIK

SEQ ID NO: 1357 - protein, 40 aa, Artificial Sequence
  Synthetic
KWTITVQGEEAIKWAIKVAEARNLDYTVHIDGDQAHITIE

SEQ ID NO: 1358 - protein, 40 aa, Artificial Sequence
  Synthetic
TTTITVTDENEARKVAEKLKRKGLEVEVRQENGKWKVRSG

SEQ ID NO: 1359 - protein, 43 aa, Artificial Sequence
  Synthetic
ATVHVKGITYHFNNPEEAYKFAVQVARELGGTFEVHGNEIHVD

SEQ ID NO: 1360 - protein, 43 aa, Artificial Sequence
  Synthetic
VTVHLGDLTWHFDNPEEAKKWAKQMAKEYNREVEFHGNTIEIH

SEQ ID NO: 1361 - protein, 43 aa, Artificial Sequence
  Synthetic
PDDLKKKAKELVKNGASPEEVRRWLKKAGLSEDEARKIAKEIF

SEQ ID NO: 1362 - protein, 43 aa, Artificial Sequence
  Synthetic
DEDVKRIVERLLKNGVSEDQVREILKRQGFDPRDIERVIRELS

SEQ ID NO: 1363 - protein, 43 aa, Artificial Sequence
  Synthetic
PDEEAKRRVEEAIRRGNRELARRIARKYGISEDWVDELAKKLG

SEQ ID NO: 1364 - protein, 43 aa, Artificial Sequence
  Synthetic
PDEVVKIFQELKRRGVSDEEVRKILQKRGISDEQIKKAREKAG

SEQ ID NO: 1365 - protein, 40 aa, Artificial Sequence
  Synthetic
KITVTFNGEEAARRFMEKAKKANLTVKVEVHNGKWVVTLE

SEQ ID NO: 1366 - protein, 40 aa, Artificial Sequence
  Synthetic
SVTLEVNGEEAARRLLKELRKQNLEAEIHVHNGKFVVTIK

SEQ ID NO: 1367 - protein, 43 aa, Artificial Sequence
  Synthetic
QEEEKKKVARELINKGNRDKAKEWLKRQGVSEDEAERILDEAK

SEQ ID NO: 1368 - protein, 43 aa, Artificial Sequence
  Synthetic
HTVHVGNTTYKFDTKQEAEEFAKKVAKKLGKTVTVKNGQVTVE

SEQ ID NO: 1369 - protein, 43 aa, Artificial Sequence
  Synthetic
PEELLRQVVEALRRGDEERVRRLAERIGVDEEQVEELARRVEG

SEQ ID NO: 1370 - protein, 43 aa, Artificial Sequence
  Synthetic
NEEVKKIVERLLKNGVSDEEIEKILKRNGVDPKEVKDVIERVK

SEQ ID NO: 1371 - protein, 40 aa, Artificial Sequence
  Synthetic
KFTTTMDGEEKARKYAKMLKKQNLEVHVRVENGKWVITAE

SEQ ID NO: 1372 - protein, 40 aa, Artificial Sequence
  Synthetic
TTTYRTRDEEEAKKWAEEARRKGLTVRVREENGEFKVEID

SEQ ID NO: 1373 - protein, 40 aa, Artificial Sequence
  Synthetic
EETYTFHGPEQAKKFIQWAKEANLEFEVQQHGDEFIITIK

SEQ ID NO: 1374 - protein, 43 aa, Artificial Sequence
  Synthetic
SEKEKRIQELAERAGVSPEILKEALKRANGDEDKAEEIAKKLQ

SEQ ID NO: 1375 - protein, 43 aa, Artificial Sequence
  Synthetic
SPSEYKKKAEQAVREGDPEKAKQILKKAGLSPEQARQIVEKIQ

SEQ ID NO: 1376 - protein, 43 aa, Artificial Sequence
  Synthetic
TTVHVGNTTYHFSDPEEVKRFVKKLVKELNVTVEHHGNEVHVS

SEQ ID NO: 1377 - protein, 43 aa, Artificial Sequence
  Synthetic
DEEIEKELRKLRKNGVTHYTVNGTDLQITTEEQIRHVVKIIES

SEQ ID NO: 1378 - protein, 43 aa, Artificial Sequence
  Synthetic
TTVKVNGQKFTFETAEEAAKWAKKYAKKQGLKVEVHGNEIQIH

SEQ ID NO: 1379 - protein, 43 aa, Artificial Sequence
  Synthetic
TEEVEKKVERLLKNGVSPEQVIRILKKQGVDEEEVKEVVKKVG

SEQ ID NO: 1380 - protein, 43 aa, Artificial Sequence
  Synthetic
KQVHVNGYTYKFDNPEEALKFAKEMAKKLNGQVHVHGDRIEIH

SEQ ID NO: 1381 - protein, 43 aa, Artificial Sequence
  Synthetic
TEEVEKIVRELQKRGVSQEEIQRILKRNGIDPRDVEHVVRRLR

SEQ ID NO: 1382 - protein, 43 aa, Artificial Sequence
  Synthetic
IQVHVNGVTFHFNNPEEVKKFAKKVAKENNLRVEFHGEQVRIE

SEQ ID NO: 1383 - protein, 43 aa, Artificial Sequence
  Synthetic
LEVHVNGLTYKFNNPEDAERFAREVAKKQGAEIEFHGNQIHIK

SEQ ID NO: 1384 - protein, 40 aa, Artificial Sequence
  Synthetic
GVTFHVDGEEKALRVWEMLLRRNLNVEIHEHNGKFVITAD

SEQ ID NO: 1385 - protein, 43 aa, Artificial Sequence
  Synthetic
DDKAKEYAHKALRKGVSEDQIREWLERQGYSTQEAEDIIRAAK

SEQ ID NO: 1386 - protein, 43 aa, Artificial Sequence
  Synthetic
RQVHVGNVTYHFSSPEEALRFALEMAKKLGLQVHIDGETIHVE

SEQ ID NO: 1387 - protein, 40 aa, Artificial Sequence
  Synthetic
QIDIEVHGEEQLEKALKWVKAQNYKAEVRIENGKIVVHAK

SEQ ID NO: 1388 - protein, 43 aa, Artificial Sequence
  Synthetic
SEKVKRIVERLYKNGVDSEQIKEILKRNGVDPRDVEKVVREVV

SEQ ID NO: 1389 - protein, 40 aa, Artificial Sequence
  Synthetic
KWKIEVQGEEQLKRAIKHLRDRNLDVKVEQRGNRWIIQAD

SEQ ID NO: 1390 - protein, 43 aa, Artificial Sequence
  Synthetic
TEVHVNGVTYHFSNPEQAKKWAEEMARKLGLKMEIHGDTIRVE

SEQ ID NO: 1391 - protein, 43 aa, Artificial Sequence
  Synthetic
TQDEARKKAKKAYRNGNEDKARQILKDAGFSPEQIEKILRKAN

SEQ ID NO: 1392 - protein, 43 aa, Artificial Sequence
  Synthetic
SPKAEEIARELKERGYSPDEIRKILQKLGVSDDEAHEAIKRVF

SEQ ID NO: 1393 - protein, 43 aa, Artificial Sequence
  Synthetic
EQVHVGNETYTFPSPEDALKWAQEYAKKKGLKVEQHNGTVKIH

SEQ ID NO: 1394 - protein, 43 aa, Artificial Sequence
  Synthetic
NSEKLEKLAKEALKNGDKETAKKILKKAGLSEDQAKEVVDKFL

SEQ ID NO: 1395 - protein, 43 aa, Artificial Sequence
  Synthetic
TEEVERIVEKLLRNGASDEDVKRELQKRGVDDKEIEDIIKKLK

SEQ ID NO: 1396 - protein, 40 aa, Artificial Sequence
  Synthetic
KVTYHFDGEEQAKRFWKEMVKRNLKVRIEIRNGKAIVEVE

SEQ ID NO: 1397 - protein, 43 aa, Artificial Sequence
  Synthetic
TEVHVDGITYKFDEPEQAKKFALEMAQKLGMQMHVDGNQIHVK

SEQ ID NO: 1398 - protein, 43 aa, Artificial Sequence
  Synthetic
TQVHVNGVQYDFNNPEEAEKFVKKVVKKLNGTVELKDGTYHIE

SEQ ID NO: 1399 - protein, 43 aa, Artificial Sequence
  Synthetic
MEEYKKYVKHLKDQGVSEEELKRALEKLGLSPEQVKQVVKDVL

SEQ ID NO: 1400 - protein, 43 aa, Artificial Sequence
  Synthetic
LPEVEKVVKRLLDNGVDERQVVEILRRQGVDPKEVEEALKRVS

SEQ ID NO: 1401 - protein, 43 aa, Artificial Sequence
  Synthetic
DEEVVRIWEELQRRGVDDRQVRDILRRQGIDPRRIEEAERLVK

SEQ ID NO: 1402 - protein, 40 aa, Artificial Sequence
  Synthetic
TTTYTFTDRSEAERARKEWEKKGYTVTIEDRNGEFHLTVD

SEQ ID NO: 1403 - protein, 43 aa, Artificial Sequence
  Synthetic
DEDVQKVVERLLRNGVDERQIDDHLKKLGVSDEQIKRAKRYVY

SEQ ID NO: 1404 - protein, 40 aa, Artificial Sequence
  Synthetic
TTTITVTNEEKARRIITELRQRGYDVQVTKENGKWKIEVG

SEQ ID NO: 1405 - protein, 43 aa, Artificial Sequence
  Synthetic
SEEAKKRVEELKKNGISPDQIREILKRQGFSDEQVDRILKSVI

SEQ ID NO: 1406 - protein, 43 aa, Artificial Sequence
  Synthetic
QQVYIGNETYTFPNPEKAQKYAKKLAKKYNLTVHVSGNQVTVK

SEQ ID NO: 1407 - protein, 43 aa, Artificial Sequence
  Synthetic
TTVHVGNVTYHFDNPEKAKKFAKEVAKKLGLEIQFHGNTIHIE

SEQ ID NO: 1408 - protein, 43 aa, Artificial Sequence
  Synthetic
MEEVERLVEKLVRNNVDPDQVRKYLRRRGVDPDAVDKAVKRAI

SEQ ID NO: 1409 - protein, 43 aa, Artificial Sequence
  Synthetic
PEEVEKIVRKLLREGVDERQIEEHLTRRGIDTDEVRRVIKEVS

SEQ ID NO: 1410 - protein, 43 aa, Artificial Sequence
  Synthetic
SEIEKIAEKLWRERPGSKEWVVEVLKRLGVTEDEARKAAEKAE

SEQ ID NO: 1411 - protein, 43 aa, Artificial Sequence
  Synthetic
TTVHVNGVTYHFETPEKAKKWAEKLARELGRQVHYKDGQFHVE

SEQ ID NO: 1412 - protein, 43 aa, Artificial Sequence
  Synthetic
PEDEKRLEDAARILGISRDEAKKRAKKLNLSPEEFEEWAKKER

SEQ ID NO: 1413 - protein, 43 aa, Artificial Sequence [sequence omitted]

SEQ ID NO: 1414 - protein, 43 aa, Artificial Sequence
  Synthetic
DEEIKKIVEELKRRGVDSEQIKEILKRNNVDEEQIRKAEKYFR

SEQ ID NO: 1415 - protein, 43 aa, Artificial Sequence
  Synthetic
GTVHVGDETYHFPNPEEAQKFAKKLAKKKGLEVHVDGNTITVK

SEQ ID NO: 1416 - protein, 43 aa, Artificial Sequence
  Synthetic
DEKIEKLVRDLKKQGVSSEEIKEYLKRQGVSDEQVKEAEKVYK

SEQ ID NO: 1417 - protein, 43 aa, Artificial Sequence
  Synthetic
LTVHVGDVTYHFPNPEEAEKFAKRVAKELGRTFEIHGNTIHVE

SEQ ID NO: 1418 - protein, 43 aa, Artificial Sequence
  Synthetic
STVHVNNETYHFDNPEKAQKFAEKLAKELGLKVHKSGNEFKIE

SEQ ID NO: 1419 - protein, 43 aa, Artificial Sequence
  Synthetic
GTVEVQGVEYRFENPEQAERFAKEMAKKLGLQLEVHGDKWKVE

SEQ ID NO: 1420 - protein, 43 aa, Artificial Sequence
  Synthetic
TTVHVNGITLQSDNEEKLKKLAKKLAKKYNLKVTQHGDTIRVE

SEQ ID NO: 1421 - protein, 40 aa, Artificial Sequence
  Synthetic
ETTWTVEGEELLKKIIEELKKRNLKVEVEKHGDQWIITAK

SEQ ID NO: 1422 - protein, 40 aa, Artificial Sequence
  Synthetic
TKHIRTTDRNEAERIRKEAEKRGLRVTVREENGEFEIRID

SEQ ID NO: 1423 - protein, 40 aa, Artificial Sequence
  Synthetic
TITRTYTDETEARRAAEEWRRRGKQVHIRTHGTTFTIEVN

SEQ ID NO: 1424 - protein, 43 aa, Artificial Sequence
  Synthetic
ITVHVNGVQYHFDNPEEVDKFVKKVVKEHNLTVEYHGNTIHVE

SEQ ID NO: 1425 - protein, 43 aa, Artificial Sequence
  Synthetic
RDDLKEQAKKDLKNGASEDEVKELLKRAGVTEKEIEKILRKAR

SEQ ID NO: 1426 - protein, 43 aa, Artificial Sequence
  Synthetic
RSEAEELAERLYRSGKSKEEIKKVLKNAGFSEDQAQKIVDRVV

SEQ ID NO: 1427 - protein, 43 aa, Artificial Sequence
  Synthetic
PEDAEKLADRLYKNGVSEEEIRRALQRAGVDDRIVEKVVQKVL

SEQ ID NO: 1428 - protein, 43 aa, Artificial Sequence [sequence omitted]

SEQ ID NO: 1429 - protein, 40 aa, Artificial Sequence
  Synthetic
EWEYTFDGKEAADRMAKHLKKMNLEVHIRTENNKYIVRAS

SEQ ID NO: 1430 - protein, 43 aa, Artificial Sequence
  Synthetic
DEEVKRLKERAERLGLDLEQLLEQLRREGNEEQVEKLEKYIKS

SEQ ID NO: 1431 - protein, 43 aa, Artificial Sequence
  Synthetic
DEEEIKRQIKDALRKGDEDKVKELLKRRGISEEEVKKIVKRLS

SEQ ID NO: 1432 - protein, 43 aa, Artificial Sequence
  Synthetic
PQEVVEIVRELQKNGVSDEEVKEILKRQGVDPREVEKALQLVK

SEQ ID NO: 1433 - protein, 43 aa, Artificial Sequence
  Synthetic
GTVHVNNKTYHFPNPQEALKFAKKAAKIYQLKIHFHNGTIKLK

SEQ ID NO: 1434 - protein, 43 aa, Artificial Sequence
  Synthetic
SEDSKELKKLLQKAGASDDEAEEILKKAGGNPEEVKKWINKYL

SEQ ID NO: 1435 - protein, 43 aa, Artificial Sequence
  Synthetic
PEEQLKKEAKKALKNGDKDKAEELLRRAGVSEDEIEELKRRAG

SEQ ID NO: 1436 - protein, 43 aa, Artificial Sequence
  Synthetic
DEDVVKIFKRLQDNGVDPEQVRKILQKQGISDDQIKKAERIVS

SEQ ID NO: 1437 - protein, 40 aa, Artificial Sequence
  Synthetic
SEEYTYTDRREAERAREEAERKGLTVRLEERNGRWHVEIR

SEQ ID NO: 1438 - protein, 40 aa, Artificial Sequence
  Synthetic
EIHITTHGEEQMKKAVEHLRRRNLDVKVKQEGNRWIITAQ

SEQ ID NO: 1439 - protein, 43 aa, Artificial Sequence
  Synthetic
GTVHVNNVTYHFDEPEQAKKFAERVAKELGLKLELHNGEFHIE

SEQ ID NO: 1440 - protein, 40 aa, Artificial Sequence
  Synthetic
AIHITFNGEEKARKAAKEFRAQNLEVELRQENGQWVITIK

SEQ ID NO: 1441 - protein, 43 aa, Artificial Sequence
  Synthetic
TPELKKEVQKALKNGVSPDEVEKYLKELGVDPEEAKKLAKYAE

SEQ ID NO: 1442 - protein, 43 aa, Artificial Sequence
  Synthetic
TTVDVNGVTYHFSSPEEALKFALEMAKKLNLEVHVHGERIRVE

SEQ ID NO: 1443 - protein, 43 aa, Artificial Sequence
  Synthetic
GTVHVGNETYHFKNPEEAWKYAKKLAEKLNLQVTIKNGTVQVH

SEQ ID NO: 1444 - protein, 40 aa, Artificial Sequence
  Synthetic
SQTYTVDGEEKAKKLMKILRAQNLEVHITRHGDRFILHVS

SEQ ID NO: 1445 - protein, 43 aa, Artificial Sequence
  Synthetic
DEELKKIVEKLKRDGYSDDQIKEILQRQGVDDRQVEKVIRQVG

SEQ ID NO: 1446 - protein, 43 aa, Artificial Sequence
  Synthetic
QREEAKKKAEELVRRGNKDKARELLKRAGLSEEQAERVIQKAD

SEQ ID NO: 1447 - protein, 40 aa, Artificial Sequence
  Synthetic
RITIETEGEEALKRAIKYAKAQNLEFEVQVHNGKWILTLE

SEQ ID NO: 1448 - protein, 40 aa, Artificial Sequence
  Synthetic
SIRIEVEGEEQAKRVAKKMKAMNLDVKIQQHGDKWVVQAD

SEQ ID NO: 1449 - protein, 43 aa, Artificial Sequence
  Synthetic
PEEVRRKVERALRNGVDDEQITERLKRQGIDEDEVRQIIKELK

SEQ ID NO: 1450 - protein, 43 aa, Artificial Sequence
  Synthetic
REEEAKKRLEEAIRRGDEQLAKEIAREYNISDEEAERLIREIQ

SEQ ID NO: 1451 - protein, 40 aa, Artificial Sequence
  Synthetic
EIRITFEGEEQVKRAIKRAKDQNLEVHVTQHGDQWVVTIK

SEQ ID NO: 1452 - protein, 43 aa, Artificial Sequence [sequence omitted]

SEQ ID NO: 1453 - protein, 43 aa, Artificial Sequence
  Synthetic
KTITVDGVTYHFDNPEEALKFAQKMAKKVGGTYEIHGDHIQIK

SEQ ID NO: 1454 - protein, 43 aa, Artificial Sequence
  Synthetic
DQQELEKRVKELIKSGNEDEARKILKRVGYSPEQVEEIIQRVL

SEQ ID NO: 1455 - protein, 43 aa, Artificial Sequence
  Synthetic
ATVHVQGVTYHFDNPQQAEKFAKEMAKRLNLEIRVHGDTFRVE

SEQ ID NO: 1456 - protein, 43 aa, Artificial Sequence
  Synthetic
ATVHVDNYTYHFSNPEEAWKFALEVAQRKGGELKVKDGEFHIE

SEQ ID NO: 1457 - protein, 43 aa, Artificial Sequence
  Synthetic
DIEEQIKIAEEALKKGQPVRVGDYEVHSQEEAEKLIKLLRKQL

SEQ ID NO: 1458 - protein, 43 aa, Artificial Sequence
  Synthetic
DEEKEKDVRRLYREGVSPEELKEILRRRGVDEEEVQELVKKAV

SEQ ID NO: 1459 - protein, 40 aa, Artificial Sequence
  Synthetic
AITWTVEGEEQARRLAKKLKDHNLTVEVQRKGDKFEITAK

SEQ ID NO: 1460 - protein, 43 aa, Artificial Sequence
  Synthetic
TQVHVGNTTYTFPSTEAAQKAAEELAKKYNLTVKKYGNQFKLH

SEQ ID NO: 1461 - protein, 43 aa, Artificial Sequence
  Synthetic
PEEVEKIVEELIRRGVSDEQIKKIVKRQGVDEREVDKVIKKVK

SEQ ID NO: 1462 - protein, 43 aa, Artificial Sequence
  Synthetic
LTVHVGNVTYHFSSPEQALKFAQKIAKELNLDLEIHGETLRVE

SEQ ID NO: 1463 - protein, 43 aa, Artificial Sequence
  Synthetic
TTVHVGNVTYHFDTPEQADRFAKKIAKDLGLTMRVEGNTWHVE

SEQ ID NO: 1464 - protein, 43 aa, Artificial Sequence
  Synthetic
EEELIKDVKRLYDSGVDPRQLKKILKDRGVDDRQVDKIVRQVV

SEQ ID NO: 1465 - protein, 40 aa, Artificial Sequence
  Synthetic
KFTVTVHGEEQMKRVLKMAKDQNYKADVEVHGDRFIIHVE

SEQ ID NO: 1466 - protein, 43 aa, Artificial Sequence
  Synthetic
LPKAEEIAKRLLKQGVSPDEIKEILKKAGIDPRLAQEALDRVL

SEQ ID NO: 1467 - protein, 43 aa, Artificial Sequence
  Synthetic
SDDELLKEALEAIRRGNEDEVRRIAKELGVSPEDVKELAKRAE

SEQ ID NO: 1468 - protein, 40 aa, Artificial Sequence
  Synthetic
AITYEFEGEEQARKLEKKMRDHNLEVHVEVHNGKWVVKVS

SEQ ID NO: 1469 - protein, 43 aa, Artificial Sequence
  Synthetic
DDEVRKKVERLKRNGVSPEEIVETLKRQGVDEKEVRDIVKQLG

SEQ ID NO: 1470 - protein, 43 aa, Artificial Sequence
  Synthetic
TTVHVNGQTYHFDDPEEVKRFVKELAKKLNLRVEHHGEEIHVS

SEQ ID NO: 1471 - protein, 43 aa, Artificial Sequence [sequence omitted]

SEQ ID NO: 1472 - protein, 43 aa, Artificial Sequence
  Synthetic
ATVHVNGVTYHFDNPEKAEKFAKKVAKEQNLRLEVHNGEFHIE

SEQ ID NO: 1473 - protein, 43 aa, Artificial Sequence
  Synthetic
SEQDRALEEAAKLLGVSPDEARKLAEKNNIDPKEFAERVKKKY

SEQ ID NO: 1474 - protein, 40 aa, Artificial Sequence
  Synthetic
SVKYTFNGEEDARKMVEKAKRANLKVEVHIENGQWIVEIE

SEQ ID NO: 1475 - protein, 43 aa, Artificial Sequence
  Synthetic
QTVHVGNYTYHFDNPEEAVKWAKEMAKKYNGTVEFHGDTIHVE

SEQ ID NO: 1476 - protein, 43 aa, Artificial Sequence
  Synthetic
QTVHVGDETYTFDNPEEAYKFALKIAKDAGGTVTIDNGTVKLH

SEQ ID NO: 1477 - protein, 43 aa, Artificial Sequence
  Synthetic
TQVHVGGYTYHFNNPEEVLKFALEMARKLNLEVRFHGDRVEIH

SEQ ID NO: 1478 - protein, 43 aa, Artificial Sequence
  Synthetic
ATVTVNGVRYEFDEPEQAKEFAKKVAEKLNLELRYHGDRIHIE

SEQ ID NO: 1479 - protein, 43 aa, Artificial Sequence
  Synthetic
QTVHVNGYTYHFDNPEEAYKFAVEMAQRLGREFDVKDGTYHVK

SEQ ID NO: 1480 - protein, 43 aa, Artificial Sequence
  Synthetic
GKVLVNGTTYEFPNPELAQQFAEELAKKLNLTVEKHNGVFQLH

SEQ ID NO: 1481 - protein, 43 aa, Artificial Sequence
  Synthetic
KTVHVGNLTYHFDTPEQAYRFAERMAKELNLQMEVRGETIHVE

SEQ ID NO: 1482 - protein, 40 aa, Artificial Sequence
  Synthetic
SYKWTVEGEEQVKKAIEWAKRANLNVEVQIHGNQIVLKAD

SEQ ID NO: 1483 - protein, 43 aa, Artificial Sequence
  Synthetic
DEEEWKDRVRDALQKGDEKKVEELVKKAGLSEEILKKLREEVR

SEQ ID NO: 1484 - protein, 43 aa, Artificial Sequence
  Synthetic
TTVNVGNVTYHFNSPEEAYKFAVKMAKTLNLQVHFKGEQIDVE

SEQ ID NO: 1485 - protein, 43 aa, Artificial Sequence
  Synthetic
VKVNVNGLTYDFDTPEQALRFALEVAKKQNLKIEVHGNTIEIH

SEQ ID NO: 1486 - protein, 43 aa, Artificial Sequence
  Synthetic
DDEVRRIVEKLLREGVDDRQVKDILKKRGVDEREVERVIKEVK

SEQ ID NO: 1487 - protein, 40 aa, Artificial Sequence
  Synthetic
SVTWRVHGEEQLKKVIELMKRRNLDFEVHEHNGQYIIHAD

SEQ ID NO: 1488 - protein, 43 aa, Artificial Sequence
  Synthetic
TTVKFNGQTTTAPTTDEAQKIAEKYAKKYNLTVEVHGNKVTVK

SEQ ID NO: 1489 - protein, 43 aa, Artificial Sequence
  Synthetic
KTVQYNGLTYHFNNPEAALRYAKEVAKKLGGQVEIHGETIQVK

SEQ ID NO: 1490 - protein, 43 aa, Artificial Sequence
  Synthetic
QNVTVNGKTFHFDTPEEAQKFAKKYAQEKGLKFEVHGNTITLK

SEQ ID NO: 1491 - protein, 43 aa, Artificial Sequence
  Synthetic
TEEVEKIVRELLKKGVDEEEVKEILKRQGVSDEEVDKAVKRAS

SEQ ID NO: 1492 - protein, 43 aa, Artificial Sequence
  Synthetic
TTVHFNNWTFTADNPEEAIKWAKWLAKKFNATVHVHGNQVKVK

SEQ ID NO: 1493 - protein, 43 aa, Artificial Sequence
  Synthetic
SEDEKELRKVAKKYNVSEDLVEEAIRRANGDKERAKEIISRLG

SEQ ID NO: 1494 - protein, 40 aa, Artificial Sequence
  Synthetic
EMHITVHGDEQAERVARMLKARNLEVHLHKHNGQVIITAR

SEQ ID NO: 1495 - protein, 40 aa, Artificial Sequence
  Synthetic
EERYEVNGEEQAKKWIEWAKKQNLEVHVKVKNGKIIIHIR

SEQ ID NO: 1496 - protein, 43 aa, Artificial Sequence
  Synthetic
TEEVQKIAEKLYKNGVDPEQIKKILRKLGVSEKEAREAEKYLK

SEQ ID NO: 1497 - protein, 43 aa, Artificial Sequence
  Synthetic
LTVEFNGLQFHFDEPEQAKKFAKKVAETLQLDMTVHGNTLRID

SEQ ID NO: 1498 - protein, 40 aa, Artificial Sequence
  Synthetic
SFTLTSHGEEQLKRAIEIAKRANLSWKVEKHGNRWIIHVS

SEQ ID NO: 1499 - protein, 43 aa, Artificial Sequence
  Synthetic
PEEIEKRVRELLKQGIDDEQIKDDAKKQGIDPRTVEEVLRRIK

SEQ ID NO: 1500 - protein, 43 aa, Artificial Sequence
  Synthetic
IEDVERIVKELKKNGVSTDEIRKILKDNGVDDRQVEEVLRKVG

SEQ ID NO: 1501 - protein, 40 aa, Artificial Sequence
  Synthetic
TKTLTFTDKEQAEKAAKELKKNGYEVKITKKNGKYQLELH

SEQ ID NO: 1502 - protein, 43 aa, Artificial Sequence
  Synthetic
PDTVRKLAEKALRKGYSEEQIKELLKKWGASEDEARDAVEYLR

SEQ ID NO: 1503 - protein, 43 aa, Artificial Sequence
  Synthetic
STVNLGNTQYTFPTLEEAQKFAEKVAQKYNVTYEVHGNTVTIK

SEQ ID NO: 1504 - protein, 40 aa, Artificial Sequence
  Synthetic
GTTYTVKNKQEAEKWAKKAKKQGIEVHITQQNGTWQVTLH

SEQ ID NO: 1505 - protein, 40 aa, Artificial Sequence
  Synthetic
TTTITVTDENEARRIAEELRRRGIPLTYTKTGGYWEVRVN

SEQ ID NO: 1506 - protein, 43 aa, Artificial Sequence
  Synthetic
DDRVRREVERLLRNGVDPRQIKERLKRQGVDPDEVDKLIKRLS

SEQ ID NO: 1507 - protein, 43 aa, Artificial Sequence
  Synthetic
RQEDLKEKAKEAYRQGDSEKAEELLKKVGLSPDQAQEFLKRLN

SEQ ID NO: 1508 - protein, 40 aa, Artificial Sequence
  Synthetic
TETYTYTDEREARKAAEEAKRKGLEVEIRKENGQYKVRID

SEQ ID NO: 1509 - protein, 43 aa, Artificial Sequence
  Synthetic
ATVHVNGVTYHFSTLEEALKFAQEMAEKLNLRIEIHGNTVRVE

SEQ ID NO: 1510 - protein, 43 aa, Artificial Sequence
  Synthetic
ATVHVQGVQIDFDNPEKAVKYAQRVAKELGLEIRFHGDTIRVE

SEQ ID NO: 1511 - protein, 43 aa, Artificial Sequence
  Synthetic
PDELRRLAQELLNNGVDPEEVRKILQKNGASPEQAERILREAQ

SEQ ID NO: 1512 - protein, 43 aa, Artificial Sequence
  Synthetic
NEKAERIAKQLQKNGVTPDEIERVLKELGANPEEVRQIVERLK

SEQ ID NO: 1513 - protein, 40 aa, Artificial Sequence
  Synthetic
TTTITVTDERAARTLKKELEKRGYTVTVRTHGTEFRLEVH

SEQ ID NO: 1514 - protein, 43 aa, Artificial Sequence
  Synthetic
KTVHVGNVTYHFSSLEEAVKFALKVAREQNLRIEFHGNTIHIE

SEQ ID NO: 1515 - protein, 40 aa, Artificial Sequence [sequence omitted]

SEQ ID NO: 1516 - protein, 40 aa, Artificial Sequence
  Synthetic
EMTFTIDGEEKARRLMKELRKQNLNVEIRVENGKFVLHAK

SEQ ID NO: 1517 - protein, 40 aa, Artificial Sequence
  Synthetic
TITITVTDEEEAKKVEKWARKQGLTVTYTRHGTTFEVRID

SEQ ID NO: 1518 - protein, 43 aa, Artificial Sequence
  Synthetic
ITVHVNGVTYHFNNPEEVDKFVKRVAKELNLQVHVDGNTFHIE

SEQ ID NO: 1519 - protein, 43 aa, Artificial Sequence
  Synthetic
PEEAKKEAEELWRRGVSKSKIKEILEKLGVTREKAEKLLRKLG

SEQ ID NO: 1520 - protein, 43 aa, Artificial Sequence
  Synthetic
ITVDVGNVTYHFDEPEQVKKFIEKMAKTYNLKVEWHGNRIRIE

SEQ ID NO: 1521 - protein, 43 aa, Artificial Sequence
  Synthetic
DEEAEKRARELAKHGVDPRQIKEVLKRLGVSEEELRKIVRRVV

SEQ ID NO: 1522 - protein, 40 aa, Artificial Sequence
  Synthetic
RITVTFDGEEKARKFVKEMKNRNLDVKIRVENGQYIVTAE

SEQ ID NO: 1523 - protein, 43 aa, Artificial Sequence
  Synthetic
DEEEELLKEAEKKANGDEKKVEEILKRLGVSDEQIKRLRKKLS

SEQ ID NO: 1524 - protein, 40 aa, Artificial Sequence
  Synthetic
TTTFELDDKKQAEKVAKEWAKKGYEVTIEKHNGTFKVTVK

SEQ ID NO: 1525 - protein, 43 aa, Artificial Sequence
  Synthetic
TTVKWNGYEVHFDNPEQAEKYAAKVAKELGLTYHLKDGTIHIE

SEQ ID NO: 1526 - protein, 43 aa, Artificial Sequence
  Synthetic
PEKAKRLLEEAQKRGLTKDQFKELLKKLGYSPDEAEKVLQLAL

SEQ ID NO: 1527 - protein, 43 aa, Artificial Sequence
  Synthetic
DAEEIRKRLEKKVEEGKTVTFAGITITNKEEARKAAEEWKRRQ

SEQ ID NO: 1528 - protein, 43 aa, Artificial Sequence
  Synthetic
QTVKVGNTTYTFPNPEEAQKWAKKLAKKLNLEFHEHGNTIHLK

SEQ ID NO: 1529 - protein, 40 aa, Artificial Sequence
  Synthetic
SETITVDGTEKAMRVYEMLIRRNLRVEIQIHNGQWVFHAD

SEQ ID NO: 1530 - protein, 43 aa, Artificial Sequence
  Synthetic
ATVHVNGVTYHFPNPEEALKFALEMAKKIGGEVKIENGQYKVE

SEQ ID NO: 1531 - protein, 43 aa, Artificial Sequence
  Synthetic
DENEERIRAFALYKGIDPEKARELWERGEINKDDEEKAWREYK

SEQ ID NO: 1532 - protein, 41 aa, Artificial Sequence
  Synthetic
TTLTVNTQTYTFTSEEEAREFARRYGAKTIRKTNGTWEVHG

SEQ ID NO: 1533 - protein, 43 aa, Artificial Sequence
  Synthetic
TTVHVNGVTYHFTNPEQMWEFVKKVAETNQLKVEVRGDEIHVE

SEQ ID NO: 1534 - protein, 40 aa, Artificial Sequence
  Synthetic
QLHVQFPGEEHARKFLEWVKAQNLEATVEIHNGQYIVTVD

SEQ ID NO: 1535 - protein, 43 aa, Artificial Sequence
  Synthetic
TTVEINGIEVHFDNPEQADKYAKEMAKKLNLRLELHGNTWHVR

SEQ ID NO: 1536 - protein, 43 aa, Artificial Sequence
  Synthetic
AEVHVNGVTYKFDNPEEAERFAKEMAKKLQLEVRVKDGQFHVE

SEQ ID NO: 1537 - protein, 43 aa, Artificial Sequence
  Synthetic
QEEAKKIAEELKKRGKSEEEIKRILKKLGVSPDEAEEAIRALR

SEQ ID NO: 1538 - protein, 43 aa, Artificial Sequence
  Synthetic
YEDARKEARKLRKKGKSPEEIEKELRKLGVSEEEAKKIKKEVK

SEQ ID NO: 1539 - protein, 43 aa, Artificial Sequence
  Synthetic
SSKAEKIAKELKKRNVSPDQVKEILKKLGFSEEEIEKVLRKVF

SEQ ID NO: 1540 - protein, 43 aa, Artificial Sequence
  Synthetic
STLKVGDIKLTFDDPQKAYKYAKELAKKLNLTVEIHGNTVKVE

SEQ ID NO: 1541 - protein, 43 aa, Artificial Sequence
  Synthetic
KTVHVDGLEYTFSNPEDAVRFALEMARSKGGQVHFNGDRIEIR

SEQ ID NO: 1542 - protein, 40 aa, Artificial Sequence
  Synthetic
RLHYTYNGEEKAKEAMKEWRKKNYRAKVEIHNGQWVVTVE

SEQ ID NO: 1543 - protein, 43 aa, Artificial Sequence [sequence omitted]

SEQ ID NO: 1544 - protein, 43 aa, Artificial Sequence [sequence omitted]

SEQ ID NO: 1545 - protein, 43 aa, Artificial Sequence
  Synthetic
NEEEARRRIKEAWKRGDKDKAEEIARRAGINPEEWKELVKRLE

SEQ ID NO: 1546 - protein, 43 aa, Artificial Sequence [sequence omitted]

SEQ ID NO: 1547 - protein, 40 aa, Artificial Sequence
  Synthetic
TETLHLDNQEAAQKAAKELREKGLDVQVTQENGEWVLRIN

SEQ ID NO: 1548 - protein, 43 aa, Artificial Sequence
  Synthetic
SEKAKKLADELKKQGWDDEQIKKILRELGISDEEVKEVEELLK

SEQ ID NO: 1549 - protein, 43 aa, Artificial Sequence
  Synthetic
DEKEKRIERLAKELGVDPKLVKRALDEANGDEDKVREIVKKLK

SEQ ID NO: 1550 - protein, 43 aa, Artificial Sequence
  Synthetic
ATVHVNGLTYHFDEPEQARKFAEEVAKKLGLTVKVENGQYKVE

SEQ ID NO: 1551 - protein, 43 aa, Artificial Sequence
  Synthetic
PEDAERLAKELAKRGVSPEQIRQILEKAGVDPSLAQEIAERIK

SEQ ID NO: 1552 - protein, 40 aa, Artificial Sequence
  Synthetic
TTTVEVETEEKARRVAQEWKDRGYTVEVRRYGTRFRVHIG

SEQ ID NO: 1553 - protein, 43 aa, Artificial Sequence
  Synthetic
DDRVRQIVERLLRNGYSDEDVKDILRRQGVDDREVKRAIRQVK

SEQ ID NO: 1554 - protein, 43 aa, Artificial Sequence
  Synthetic
RKEEWAREVWELLQRGNKEKAKKVAEKAGYSLDEAKEIAKKVF

SEQ ID NO: 1555 - protein, 43 aa, Artificial Sequence
  Synthetic
LTVHVGNVTYHFNNPEEVKRFVKEVAKKLGLEVRMDNGNFKVE

SEQ ID NO: 1556 - protein, 43 aa, Artificial Sequence
  Synthetic
PDKIKEIAKRLYKKGLSEEQIERELRKQNADPTAIKEALKEIR

SEQ ID NO: 1557 - protein, 43 aa, Artificial Sequence
  Synthetic
LPAEDLFREALKKANGNTDKAREILRKIGVTEEQIERAEKAVK

SEQ ID NO: 1558 - protein, 43 aa, Artificial Sequence
  Synthetic
ATVHVNGVTYHFENPEKAYKWAEELARKMGRTFTIHNGHIHVE

SEQ ID NO: 1559 - protein, 43 aa, Artificial Sequence
  Synthetic
DERAKEHAKKLYDNGVSEEQIEKILRRLGVSDEEIKEVKRYVL

SEQ ID NO: 1560 - protein, 43 aa, Artificial Sequence
  Synthetic
PEEAEERAKELFKNGVSNEQIKKILKKLGVDDRQVEEIVRRLS

SEQ ID NO: 1561 - protein, 43 aa, Artificial Sequence
  Synthetic
TTVHVNGYTYHFDNPEEAYRFAVEMARKLNLQMHVEGDEIHVE

SEQ ID NO: 1562 - protein, 43 aa, Artificial Sequence
  Synthetic
VEELSRHVEKLKRDGVSDEEIKKILKRQGVDDRQVQEVIERVK

SEQ ID NO: 1563 - protein, 43 aa, Artificial Sequence
  Synthetic
DEEELKKQLYKAIDEGDEDKVKELARRVNISDEDVKEVYRRLA

SEQ ID NO: 1564 - protein, 43 aa, Artificial Sequence
  Synthetic
DEEVKRIVERLLKNGVSPDEIRKILQDNGVSDEQVEKVLRELN

SEQ ID NO: 1565 - protein, 43 aa, Artificial Sequence
  Synthetic
DREEAKDRVKKLIKNGNEEEARKVLKRAGVDDRQIDRFVKRVK

SEQ ID NO: 1566 - protein, 43 aa, Artificial Sequence
  Synthetic
DEDEIVKEIYKALENGDEDKVKELQRKVGLSEEQVRDLYKKLS

SEQ ID NO: 1567 - protein, 40 aa, Artificial Sequence
  Synthetic
SETYTVHGEEKAEKIVRELKKRNLKVEIERRGDRFIIHVK

SEQ ID NO: 1568 - protein, 43 aa, Artificial Sequence
  Synthetic
QTVHVNNVTYHFSNPEEAEKFARKMAKDLNLKLEFHGNTLHVE

SEQ ID NO: 1569 - protein, 40 aa, Artificial Sequence
  Synthetic
EETYEVEGDEAMKKWVEWAKANNLEVHVEVHNGKWVITIK

SEQ ID NO: 1570 - protein, 43 aa, Artificial Sequence
  Synthetic
LTVHMNGIEYRFDNPQQAEKMARKLAKTYQLQMTLDGNRWHIE

SEQ ID NO: 1571 - protein, 40 aa, Artificial Sequence
  Synthetic
SITRTVDGEEKARKIAEMYKRRNLEVHIEVRGDKAVLHIK

SEQ ID NO: 1572 - protein, 43 aa, Artificial Sequence
  Synthetic
KTVDVDNMTFHFDNPEEAVKFARRMAKELGREVQIHGDTLKVE

SEQ ID NO: 1573 - protein, 40 aa, Artificial Sequence
  Synthetic
GTTITVDDETEARKWAEWAKKQGLTVTVTRDGDTWKVEIR

SEQ ID NO: 1574 - protein, 40 aa, Artificial Sequence
  Synthetic
EITFTFNGEEDMKKFVKKAKAHNLEVHVTVENGQWVATVR

SEQ ID NO: 1575 - protein, 43 aa, Artificial Sequence
  Synthetic
DEEELEKQVREVVKRGDEDRLRELLKRQGYSDDEVDELVKKLV

SEQ ID NO: 1576 - protein, 40 aa, Artificial Sequence
  Synthetic
STFYKFDDQEAAKKFIKKAKKKGIEVHLTQRNGTWLVQQK

SEQ ID NO: 1577 - protein, 40 aa, Artificial Sequence
  Synthetic
SETWHVHGEEAAKKIYKMLAKRNLNVKVEKHGNQWVITAD

SEQ ID NO: 1578 - protein, 43 aa, Artificial Sequence
  Synthetic
SQVHIGNTTYEFPNPQEAYEWAAELAKKLGLTITVKNGNVEVH

SEQ ID NO: 1579 - protein, 43 aa, Artificial Sequence
  Synthetic
DTKVERIVEELHKNGVSPDEIREILQRRGVDPDIVEKAIQRVL

SEQ ID NO: 1580 - protein, 40 aa, Artificial Sequence
  Synthetic
TTTFRTTDPEEAKKIAKEWKKRGYTVRVETRGTTVEVEVR

SEQ ID NO: 1581 - protein, 43 aa, Artificial Sequence
  Synthetic
WTVHVNGQEYRFNNPEEVKKFVEDMAKRHNLKTEHHGNTVHIE

SEQ ID NO: 1582 - protein, 43 aa, Artificial Sequence
  Synthetic
QTVHIDGVTYHFSNPEEAEKMAKELAKKLNLRIELHGNTWHVK

SEQ ID NO: 1583 - protein, 43 aa, Artificial Sequence
  Synthetic
SKKEEEEKAKKLYKNGNKEKARRLLKKLGFDDDQIEKIERKIE

SEQ ID NO: 1584 - protein, 43 aa, Artificial Sequence
  Synthetic
PEEIERIFRELQRRGVDERQIKEQLRRNGVDPREIEDVVRKVK

SEQ ID NO: 1585 - protein, 43 aa, Artificial Sequence
  Synthetic
EDRLRKHAHELLKNGISDEQIRRILQRLNVSEEEVEDVIKAAK

SEQ ID NO: 1586 - protein, 43 aa, Artificial Sequence
  Synthetic
EDELVKEVEELQKHGVDKRQVREILRRKGVDPRQVEEAIRIVG

SEQ ID NO: 1587 - protein, 43 aa, Artificial Sequence
  Synthetic
SQVTVNGTTYTFDNPEKAKKYAKKLAKKLGLTVTVDGDQITVT

SEQ ID NO: 1588 - protein, 40 aa, Artificial Sequence
  Synthetic
AEKITVEGEENMKKRIEEAKKRNLKVEIHVENGRWVLTFK

SEQ ID NO: 1589 - protein, 43 aa, Artificial Sequence
  Synthetic
DEEAKEEIKKAIRNGVSDEQLDELAKKLNVDPREVEKIKRKIL

SEQ ID NO: 1590 - protein, 43 aa, Artificial Sequence
  Synthetic
SEEDKIREALKALENGDEKRFREIAKELNVSEDELRELAKKAQ

SEQ ID NO: 1591 - protein, 43 aa, Artificial Sequence
  Synthetic
DEKAERDAEKLYRNGVDPREVEEFLKRLGVDPKEVKEIVRRIS

SEQ ID NO: 1592 - protein, 43 aa, Artificial Sequence
  Synthetic
DERLEETVDRLKKNGVSKDQIREILRRQGVDPDQVEKIIRRVG

SEQ ID NO: 1593 - protein, 43 aa, Artificial Sequence
  Synthetic
TTEDLQELAKRLKNGEPVTVNGKTLTPSTQEAQEIIRRAEEES

SEQ ID NO: 1594 - protein, 43 aa, Artificial Sequence
  Synthetic
ATLHVNGVELHFPNPEQAKKYAKKVAKELGLKIEIHGERIEVK

SEQ ID NO: 1595 - protein, 43 aa, Artificial Sequence
  Synthetic
SRDTARKKAEEALKEGNEEKARRLLKNAGFSPEWVDKWIKTRV

SEQ ID NO: 1596 - protein, 43 aa, Artificial Sequence
  Synthetic
QTIKLGNVEIHIPNPKKAKEAAQKLAKIYNLQYTLKNNTWHFK

SEQ ID NO: 1597 - protein, 43 aa, Artificial Sequence
  Synthetic
KTVHVNGVQYDFDNPEEAMKFMLKIAKDLNLTFQVHGDQVRVE

SEQ ID NO: 1598 - protein, 43 aa, Artificial Sequence
  Synthetic
DERVEKIIRELLERGVSPEQIKEILRRNNVDEREVQKVLREVS

SEQ ID NO: 1599 - protein, 43 aa, Artificial Sequence
  Synthetic
DEKVEKLVEDLYRKGVDERQIEEILRKQGVDPREVRKAIKKVR

SEQ ID NO: 1600 - protein, 43 aa, Artificial Sequence
  Synthetic
NEKAERIWRRLERNGYNDEQIKEILQKAGISDEEIKEVKKAVS

SEQ ID NO: 1601 - protein, 40 aa, Artificial Sequence
  Synthetic
KYEYHTHGEEQAKRVVKMLRARNLEARVKVENGQIVIEVH

SEQ ID NO: 1602 - protein, 43 aa, Artificial Sequence
  Synthetic
TTVHVDGVEYRFDNPQQAVKFALEMAKSLNLKIEFHGDTIHVK

SEQ ID NO: 1603 - protein, 40 aa, Artificial Sequence
  Synthetic
QVTYEVHGEEQARELYKWAQKQNLKAEVQVHGDKWVVTVE

SEQ ID NO: 1604 - protein, 43 aa, Artificial Sequence
  Synthetic
TEDAKKIAEKLRRKGYSDDEIEEILRRLGISEEEIEKAKRELS

SEQ ID NO: 1605 - protein, 43 aa, Artificial Sequence
  Synthetic
ATVHVNGVTYHFDNPEEAKKFVEKVAKELGLTYRVEGNTWHIE

SEQ ID NO: 1606 - protein, 43 aa, Artificial Sequence
  Synthetic
PDEAKKIVAKKALKGIQQVTVNGLTVTFPSPEAAQEWAKRVLY

SEQ ID NO: 1607 - protein, 40 aa, Artificial Sequence
  Synthetic
EETYTFDGEEKARRFIEHAIRANLPFEVEIRNGQWVITIK

SEQ ID NO: 1608 - protein, 43 aa, Artificial Sequence
  Synthetic
NDEVVKRAVELLKNGVDPREVEKFLQRANVDERLIKEVKDRVL

SEQ ID NO: 1609 - protein, 43 aa, Artificial Sequence
  Synthetic
MEELEKEVEELQRRGVSDDQIKEILKKKGVSPEEVDRIVRRVS

SEQ ID NO: 1610 - protein, 43 aa, Artificial Sequence
  Synthetic
SEEDKKYVRKAYKNGVSPEQIATWLKSRGYSEQWARDVFKKAV

SEQ ID NO: 1611 - protein, 43 aa, Artificial Sequence
  Synthetic
TTVTVGDQKFTFPNPKEAKEFAKELAKKLNLTVHIHGNQITLK

SEQ ID NO: 1612 - protein, 40 aa, Artificial Sequence
  Synthetic
QITWHVEGEEQMRKAVKIAHEMNLNVRVEVHGDKYIIHAH

SEQ ID NO: 1613 - protein, 43 aa, Artificial Sequence
  Synthetic
EEEDRKRVEELLRSGVDPEQVKKYLKELGYSPEQVKRIVDELR

SEQ ID NO: 1614 - protein, 40 aa, Artificial Sequence
  Synthetic
GERITVEGEEAMKKRVKILRARNLEVHVEIHGDKIVIQAD

SEQ ID NO: 1615 - protein, 43 aa, Artificial Sequence
  Synthetic
LEVHFDGLTYHFDKPEQAYKFALKVAREQNRTLEVHGNEWRVT

SEQ ID NO: 1616 - protein, 43 aa, Artificial Sequence
  Synthetic
LTVHVQGVEYRFDEPEQARQFAEKMAKSLNLKLEVHGNTWHVE

SEQ ID NO: 1617 - protein, 43 aa, Artificial Sequence
  Synthetic
DKEEIEEEIKEVVKRGDEERVKELLKRQGYSDEEVEKIVQRLM

SEQ ID NO: 1618 - protein, 43 aa, Artificial Sequence
  Synthetic
QTVHVNGMEYHFPNPEEAEKFAKEMAKKLGLKVEIHGDRLEVK

SEQ ID NO: 1619 - protein, 43 aa, Artificial Sequence
  Synthetic
ATVHVNGVTYHFDNPEKAKEFAEKMAKKLGMRLEVHNGQIRVE

SEQ ID NO: 1620 - protein, 43 aa, Artificial Sequence
  Synthetic
TTVHVNGQKLTFPSLEAAKKAAKKLAKELGLKVTVHGNQIKVE

SEQ ID NO: 1621 - protein, 43 aa, Artificial Sequence
  Synthetic
KTVEVGNTKYTFGNPKEAKEWAKKVAEKLGLKLVVDGTTIKLK

SEQ ID NO: 1622 - protein, 43 aa, Artificial Sequence
  Synthetic
LQEELKKQVEELVRRGDEDRAKEVLKRVGFSDEEVEKIVKKVS

SEQ ID NO: 1623 - protein, 43 aa, Artificial Sequence
  Synthetic
QTVHVGNETYQFDTPEAAQKFAKKAAKKLNLTVEIHGNTITVQ

SEQ ID NO: 1624 - protein, 40 aa, Artificial Sequence
  Synthetic
EETRTVEGDEAVKKELDKAKKANLEVEVEVRNGRYILHFK

SEQ ID NO: 1625 - protein, 43 aa, Artificial Sequence
  Synthetic
DEELEKDVRRLLREGVDERQVKEILQRQGVDDRQVEEILRRLS

SEQ ID NO: 1626 - protein, 43 aa, Artificial Sequence
  Synthetic
TTVTINGVQYDFNNPEEAEKFAKKMAKELGLEVRFHGEQIRIE

SEQ ID NO: 1627 - protein, 43 aa, Artificial Sequence
  Synthetic
DEEDKKVKKVAKLLNISEDQVRELQRKLNVDLEQVVEIIQKQR

SEQ ID NO: 1628 - protein, 43 aa, Artificial Sequence
  Synthetic
DEEVEKIVERLQRQGISPDQIAEILRRLGVDERQVQEVKKRVS

SEQ ID NO: 1629 - protein, 40 aa, Artificial Sequence
  Synthetic
QITITQHGEEQAKKIIEYAKAHNLEYHVEVKNNQFIIHLR

SEQ ID NO: 1630 - protein, 40 aa, Artificial Sequence
  Synthetic
TYRSTYTDEENAKRAEKWARKYGGTVTITKDGTTFTVEVR

SEQ ID NO: 1631 - protein, 43 aa, Artificial Sequence
  Synthetic
DEEDEKKVKKLLDNGVDEEQVVDWIVKLGYSEEQARKIVKKVS

SEQ ID NO: 1632 - protein, 43 aa, Artificial Sequence
  Synthetic
HEEDVQREVKEVLKHGDEKRAREILKKAGYSDEEVERILQRLL

SEQ ID NO: 1633 - protein, 40 aa, Artificial Sequence
  Synthetic
EIHITMDGEEDAKRVIKILRDQNLEVEVHVHGDKITVTAR

SEQ ID NO: 1634 - protein, 40 aa, Artificial Sequence
  Synthetic
AEHYTFEGEEQARRFAKEMKERNLEFEIHVHNGRFVVTVK

SEQ ID NO: 1635 - protein, 43 aa, Artificial Sequence
  Synthetic
EYVNVNGKKFKVNNPEKAHKIALKLAKELGGTVTVKNGEYHVK

SEQ ID NO: 1636 - protein, 43 aa, Artificial Sequence
  Synthetic
ITVHVNGVQYHFDNPEQVKKFVDEMAKRHQLKVEVHGDTIHIE

SEQ ID NO: 1637 - protein, 43 aa, Artificial Sequence
  Synthetic
DKEKVKEEVKKVVKQGDEERARKILQRAGIDEDEVEKILQRLK

SEQ ID NO: 1638 - protein, 43 aa, Artificial Sequence
  Synthetic
SKEKLKELAKEALKNGNREKAEKLLKKAGISEDEAQEIIDRIA

SEQ ID NO: 1639 - protein, 43 aa, Artificial Sequence
  Synthetic
PEELQKQVKELLRRGVDPREVKDILRRHGVDDRQVDEIVKRAS

SEQ ID NO: 1640 - protein, 43 aa, Artificial Sequence
  Synthetic
KQVTFQGKTYTFDNPEKAQKWAKWAAKKYNLTVHVDGDQITVT

SEQ ID NO: 1641 - protein, 43 aa, Artificial Sequence
  Synthetic
PEDEARKRAEKAIKKGNKEEAREILERAGFSTDEAEEIIRRIK

SEQ ID NO: 1642 - protein, 43 aa, Artificial Sequence
  Synthetic
DDDVRRLVKELLDNGLSPEQVLRTLKKRGVDEKEVQDILKQLS

SEQ ID NO: 1643 - protein, 43 aa, Artificial Sequence
  Synthetic
DQEKVKEEVKKAVKDGDEDKVRELLRKAGVSEEQIEKFKKRVL

SEQ ID NO: 1644 - protein, 43 aa, Artificial Sequence
  Synthetic
STVNVNGVQYHFPNPEEADKFAKKIAKELNLKIEVHGDTWRVE

SEQ ID NO: 1645 - protein, 43 aa, Artificial Sequence
  Synthetic
DEHLERIVKELLDKGVDEEQVKRYLQKQGVSDEQVDKIVKKVS

SEQ ID NO: 1646 - protein, 43 aa, Artificial Sequence
  Synthetic
EDRQKEVIKIAQKRGLSPDQAKELAQRAGLSDEAAERIRQYLE

SEQ ID NO: 1647 - protein, 43 aa, Artificial Sequence
  Synthetic
TTVEVDNYTYHFNNPEEALKFVLEVAKRKGGTFTFKDGTFHIT

SEQ ID NO: 1648 - protein, 40 aa, Artificial Sequence
  Synthetic
RITYHVDGTEKALRIVEEAKKQNLEARIRVENNQWIIHVE

SEQ ID NO: 1649 - protein, 43 aa, Artificial Sequence
  Synthetic
DEELKRRVERLLRNGVDPRQIKEELKRQGVDERKVEKIIKEVS

SEQ ID NO: 1650 - protein, 43 aa, Artificial Sequence
  Synthetic
DSEELQEEVKKYVKRGNEEEAKKILKRAGVSDEEIKKFIKRVS

SEQ ID NO: 1651 - protein, 43 aa, Artificial Sequence
  Synthetic
TTVHVNGVTYHFDEPEQARKFAERVAKEQNRELHVKDGEFHIE

SEQ ID NO: 1652 - protein, 43 aa, Artificial Sequence
  Synthetic
DEELKKIVEELLRKGVSEDQIREVLKRLGVDDRQVDRIIREVK

SEQ ID NO: 1653 - protein, 43 aa, Artificial Sequence
  Synthetic
PKEDLEREAKKAIKEGNEEKAEELLKRAGYSPEQAQRIIKEVS

SEQ ID NO: 1654 - protein, 43 aa, Artificial Sequence
  Synthetic
MTVHVNGLTYHFNNPEEARKFAEEVAKKLGREVELHGNTFHVE

SEQ ID NO: 1655 - protein, 43 aa, Artificial Sequence
  Synthetic
GTVHVQGVTYHFSTPEEAARFALKVAKDLGLKVEFHGNTIHVE

SEQ ID NO: 1656 - protein, 43 aa, Artificial Sequence
  Synthetic
PQEELIRQVAKALKDGDEDRVRELVKRVNLDPRQVKRIVDRLG

SEQ ID NO: 1657 - protein, 40 aa, Artificial Sequence
  Synthetic
RYTFTSEGEEQAKAIVKWAKKANLEVHVEIHNGQYIIQVD

SEQ ID NO: 1658 - protein, 43 aa, Artificial Sequence
  Synthetic
DERLEKTVEKLLKNGVDEREVVKILAKQGYDERQAEKVVRKVK

SEQ ID NO: 1659 - protein, 43 aa, Artificial Sequence
  Synthetic
PEDVEKTVRKLLRNGVDPRQVKETLERNGVDPRIVEKIIKEVS

SEQ ID NO: 1660 - protein, 43 aa, Artificial Sequence
  Synthetic
SEEIKEIIKELLKRGVSDEEVQEHLKRNGYDQEEVRKLIEELK

SEQ ID NO: 1661 - protein, 43 aa, Artificial Sequence
  Synthetic
SQKLLKLAIKIAQNGQPVKLAGFELKPGDQDAIEKALKAIKKL

SEQ ID NO: 1662 - protein, 43 aa, Artificial Sequence
  Synthetic
ATVTWNGVTVHFDNPEEAYKMAVEVARKLNGKVELHNGQFHIE

SEQ ID NO: 1663 - protein, 43 aa, Artificial Sequence
  Synthetic
TTVTVGNVTYHFDNPEEAERFAKEMAKRHNLQIEVHGDRWRVE

SEQ ID NO: 1664 - protein, 43 aa, Artificial Sequence
  Synthetic
TTVHFGNVTYHFDNPEEALKFAEKLARDYGAQIHMEGDEIHVE

SEQ ID NO: 1665 - protein, 43 aa, Artificial Sequence
  Synthetic
PEKVERIVEKLVRNGVDERQIEKILREAGVSEEEIERVKKKVT

SEQ ID NO: 1666 - protein, 43 aa, Artificial Sequence
  Synthetic
GTVEFNGLQYHFDNPEEADKFAKKVAKKLNGRVEVHGDTWHIK

SEQ ID NO: 1667 - protein, 43 aa, Artificial Sequence
  Synthetic
PEEVEKIVEDLLKRGVSEEQIREILRKNGVDPRAIEEVLRKLS

SEQ ID NO: 1668 - protein, 43 aa, Artificial Sequence
  Synthetic
LRKAEKIIKELAKRGVTPEEIKKIAKKLGFTEEKAERIIRKFK

SEQ ID NO: 1669 - protein, 40 aa, Artificial Sequence
  Synthetic
SMTIQMPGEEAAKELMKELKKQNLRFEVHRHGDQWVVHVE

SEQ ID NO: 1670 - protein, 43 aa, Artificial Sequence
  Synthetic
QTVTVNGVNYTFDNPEQAERFAKEMAKKLNLKLTLHGNQWHVE

SEQ ID NO: 1671 - protein, 43 aa, Artificial Sequence
  Synthetic
PREVEEIVRKLLEQGVDERQIREHLKRNGIDDREVDEAIRRVK

SEQ ID NO: 1672 - protein, 43 aa, Artificial Sequence
  Synthetic
PHDDLREEVKRALSEGDEDKAKEIARKAGISEDEIEKLKKKLS

SEQ ID NO: 1673 - protein, 43 aa, Artificial Sequence
  Synthetic
TTVEVNGVQYHFNNPEEAKKFAEKMAKDLGMELRVKDGTWHVE

SEQ ID NO: 1674 - protein, 40 aa, Artificial Sequence
  Synthetic
QETRTYDGKEQALKAVEWAKKQNLPAKLRVENNKWIVTID

SEQ ID NO: 1675 - protein, 43 aa, Artificial Sequence
  Synthetic
QTVKVNGQKYNFDTPEKAEKYAKKAAKAVGGTVELHNGTWHVK

SEQ ID NO: 1676 - protein, 40 aa, Artificial Sequence
  Synthetic
TYTFKVDNKDQAKKAAKWAKKLGLSFQIEKHGDTFKITVQ

SEQ ID NO: 1677 - protein, 43 aa, Artificial Sequence
  Synthetic
SEDDKKKTIKELVDRGNEEKARRWAKKAGFSEEEVDRIIREAL

SEQ ID NO: 1678 - protein, 43 aa, Artificial Sequence
  Synthetic
TDDEVNERAKELLRQGNEQEAQELLEKLGLSPQEAKEWLEKAK

SEQ ID NO: 1679 - protein, 43 aa, Artificial Sequence
  Synthetic
TTVHVNGVQYHFNNPEEVRKFVEKMAKTYNLEVRVRGDEWHVE

SEQ ID NO: 1680 - protein, 43 aa, Artificial Sequence
  Synthetic
AEVHVNGLTYKFSSPEEAQRFAKEVAKKLGLQVHIHGPHVKVE

SEQ ID NO: 1681 - protein, 43 aa, Artificial Sequence
  Synthetic
TDDLTELAQRLQKNGVSDDEIRKILEKAGLSPEQAQRAIERAR

SEQ ID NO: 1682 - protein, 43 aa, Artificial Sequence
  Synthetic
DERIKDIVRRLLEQGVSDEQVRRILERQGVDEEEVKRVIREVK

SEQ ID NO: 1683 - protein, 40 aa, Artificial Sequence
  Synthetic
QITVTFDDETDARRFEKEMKDRNLEVEVRVENGKWIITAR

SEQ ID NO: 1684 - protein, 43 aa, Artificial Sequence
  Synthetic
SELEKRLKRIVKERQLSEEQIRDVARKLGIDERQVDKVVRELK

SEQ ID NO: 1685 - protein, 43 aa, Artificial Sequence
  Synthetic
PEEVERIVKELLKNNVDDDQIRKILQKRGVDDRQVEDVLKKVK

SEQ ID NO: 1686 - protein, 40 aa, Artificial Sequence
  Synthetic
QMTIEVPNEEAAKRLYEMAVKRNLTVEVQVHNGKFVVHFK

SEQ ID NO: 1687 - protein, 43 aa, Artificial Sequence
  Synthetic
ITVDVNGITYHFNNPEEADKFAKKIAKDLNLQLHVDGNKLRVE

SEQ ID NO: 1688 - protein, 43 aa, Artificial Sequence
  Synthetic
SEQEKKDAQEAAKKRPNPEEIKKILKKLGYSEEEAEKLARWVM

SEQ ID NO: 1689 - protein, 43 aa, Artificial Sequence
  Synthetic
EERVERIVRELLDRGVDREQVVKIVKRKGVDEEEVRRVVKKLG

SEQ ID NO: 1690 - protein, 43 aa, Artificial Sequence
  Synthetic
KTVHMDNLTWHFDNPEKAKEFAKELAKKYGGRVHIHGDEIHVK

SEQ ID NO: 1691 - protein, 40 aa, Artificial Sequence
  Synthetic
SITLEFHGEEKAMRAVKEMKDRNLEVHWRVENGKWILTAH

SEQ ID NO: 1692 - protein, 43 aa, Artificial Sequence
  Synthetic
KTVTVNGVEYRFDNPEQAEEFVKRVAKTYNLTYEIHGDRIHVE

SEQ ID NO: 1693 - protein, 40 aa, Artificial Sequence
  Synthetic
STTYTYTDPEAAREAAERAKRNGLKVRIQKENGTFKVEIE

SEQ ID NO: 1694 - protein, 43 aa, Artificial Sequence
  Synthetic
DEKLKEEVERLLRNNVDDRQIKEELDRRGVDEEEVERLIREVK

SEQ ID NO: 1695 - protein, 43 aa, Artificial Sequence
  Synthetic
GTVLNNGQKVDIPNVDKAWKYAKKLAKKLGLTVTLKGNTVHLS

SEQ ID NO: 1696 - protein, 43 aa, Artificial Sequence
  Synthetic
GTVKFNGIEVTFPTLDAAIKWAEEVAKKLNLELQVHNGTIHLH

SEQ ID NO: 1697 - protein, 43 aa, Artificial Sequence
  Synthetic
KEEVEERAKRLYENGVNPEQIKEILKRLGVSDEEVEKVVRKAV

SEQ ID NO: 1698 - protein, 43 aa, Artificial Sequence
  Synthetic
NDEAKKEVEKLVRNGVDPDQVKREARKLGVSDEIVKEIERKVL

SEQ ID NO: 1699 - protein, 43 aa, Artificial Sequence
  Synthetic
QTVHVDGVEYHFNNPEEAKKFAEEVAQKKGGTVEFRGDTIHVE

SEQ ID NO: 1700 - protein, 43 aa, Artificial Sequence
  Synthetic
DDEAREIVKRLLERGVSEDEIKDELRKRGVDPRKVDQLIKEIQ

SEQ ID NO: 1701 - protein, 43 aa, Artificial Sequence
  Synthetic
ITVKFNNYEYHFNNPEEAKKFVEKVAKSLGLRVELHNGTYHMT

SEQ ID NO: 1702 - protein, 40 aa, Artificial Sequence
  Synthetic
AITFRFEGQEKAKKFYEKLMRQNLEATIHIHGDEVHVTVH

SEQ ID NO: 1703 - protein, 40 aa, Artificial Sequence
  Synthetic
TEHYTFHTEEQAQRAAKKFKKQGLPVTIHEKNGKFTLQVN

SEQ ID NO: 1704 - protein, 40 aa, Artificial Sequence
  Synthetic
EIDYTFNGEEQAKRFWKEMMDRNLEAEVHIENNQWIVKVK

SEQ ID NO: 1705 - protein, 40 aa, Artificial Sequence
  Synthetic
ETQIKVDDKKQAEELYKKAKKLGIPVQITQKNGTWFVKVK

SEQ ID NO: 1706 - protein, 43 aa, Artificial Sequence
  Synthetic
DKKLKDQAKELLDRGVDPRQIKEYLQRQGVDDREVEKVLRAVL

SEQ ID NO: 1707 - protein, 43 aa, Artificial Sequence
  Synthetic
PKLKKLFEEAQRKAGGDTEKAREILRRLGVSEEEIKRAEKLYK

SEQ ID NO: 1708 - protein, 43 aa, Artificial Sequence
  Synthetic
SKEELKEKAKELLKKGNKEEAEEALKEAGISEEEAKQFLDKVE

SEQ ID NO: 1709 - protein, 40 aa, Artificial Sequence
  Synthetic
QYHYEVTGEEAAEKVIRMLQKMNLEVHWRKEGDKIIITAD

SEQ ID NO: 1710 - protein, 43 aa, Artificial Sequence
  Synthetic
PEEVERIVERLLKNGYSPEQVKRIIERRGYDPREVERAVKRVV

SEQ ID NO: 1711 - protein, 43 aa, Artificial Sequence
  Synthetic
SKDELKEKAREAAERGNRELAKRLWEKAGYDPREAEEWVRKVT

SEQ ID NO: 1712 - protein, 40 aa, Artificial Sequence
  Synthetic
TTEYTVTDEEEARKWAQWAKDLGLTVEIRTDGTTYRVRIG

SEQ ID NO: 1713 - protein, 43 aa, Artificial Sequence
  Synthetic
KTVHVNGVQYHFDNPEEAKKFAKEVAEKLNLELRVDGDTYRIE

SEQ ID NO: 1714 - protein, 43 aa, Artificial Sequence
  Synthetic
PTDELSRRAEEAVRRGNADKARELLKRAGYSEEEAERFVRKVK

SEQ ID NO: 1715 - protein, 43 aa, Artificial Sequence
  Synthetic
QTVKLGNTTYTFDNPEEAIKAAKKLAKKYNLKVLVDGTTVKLE

SEQ ID NO: 1716 - protein, 43 aa, Artificial Sequence
  Synthetic
TTVHVDGVQYHFENPEEAKKFAEEMAKKRNRQVHIEGDRIRVE

SEQ ID NO: 1717 - protein, 43 aa, Artificial Sequence
  Synthetic
KTVHIDGITYHFDNPEEAAKFALEMAKRLGMDVEFHGDTIHVK

SEQ ID NO: 1718 - protein, 43 aa, Artificial Sequence
  Synthetic
KQVLVGDTTYTFDNPEEAQKFAEKVAKKEGGEVTLKNGTWHVK

SEQ ID NO: 1719 - protein, 43 aa, Artificial Sequence
  Synthetic
DEEVEKRVEELVRNGVDDEQIKKIVKKLGVSEEEADELIRRVK

SEQ ID NO: 1720 - protein, 40 aa, Artificial Sequence
  Synthetic
SETYTMDGEEAAMKFLKELKDRNLEAEVRVENGQFIIHVK

SEQ ID NO: 1721 - protein, 43 aa, Artificial Sequence
  Synthetic
QEKLKEIAKELRDRGYSPDQIKEILKKLGASPDEAEEAAKVAG

SEQ ID NO: 1722 - protein, 40 aa, Artificial Sequence
  Synthetic
SITVEFDGEEAALKFMKEMRKRNLEAEIKVKNGKYHVTFD

SEQ ID NO: 1723 - protein, 40 aa, Artificial Sequence
  Synthetic
RQKYTFNGEEQAKAFVKEMKARNLTAEIKIENGKYVVEVE

SEQ ID NO: 1724 - protein, 43 aa, Artificial Sequence
  Synthetic
EERLEKRVQKLLRNGLDEREVKKYLQRQGVDDDQVDKIVRKVK

SEQ ID NO: 1725 - protein, 43 aa, Artificial Sequence
  Synthetic
TKVTVQGVEYTFDNPEEADKFAKRLAKELNLKLEVHGNTWRVE

SEQ ID NO: 1726 - protein, 40 aa, Artificial Sequence
  Synthetic
QIHRTFDGEEQARAMLEWAKKHNLEAEVTIHNGKYVVTIE

SEQ ID NO: 1727 - protein, 43 aa, Artificial Sequence
  Synthetic
SKETLERLAEKALKNGNKDKAREILKKAGYSPEQAERILQKLE

SEQ ID NO: 1728 - protein, 43 aa, Artificial Sequence
  Synthetic
NEKVERIVERLLRNNVDPRQIREILERAGVDEREVKDVLRRLS

SEQ ID NO: 1729 - protein, 43 aa, Artificial Sequence
  Synthetic
MEDTRRIAEKLKREGRSPEQAEKIAKKLGLSPDQQEYIKKYIK

SEQ ID NO: 1730 - protein, 43 aa, Artificial Sequence
  Synthetic
SEEEKKDKVRQAAKEGNEEKAKRLARKLGLSDETAKELIKRAK

SEQ ID NO: 1731 - protein, 43 aa, Artificial Sequence
  Synthetic
ATVHVNGVTYHFDNPEEAEKWAKKLAKELNRTFEVHGETWRVE

SEQ ID NO: 1732 - protein, 43 aa, Artificial Sequence
  Synthetic
DQEEIKKEVKKAVKNGDEDRVKELLKRAGIDERQVEEIIKRIK

SEQ ID NO: 1733 - protein, 43 aa, Artificial Sequence
  Synthetic
SKVFVNGKTYTFDNPEAAKKFAEKAAKEAGLTVHKKNGNFHLK

SEQ ID NO: 1734 - protein, 43 aa, Artificial Sequence
  Synthetic
PERLEKEVEELLRRGVDPREIEERLKRQGVSDEEVKEILRKVS

SEQ ID NO: 1735 - protein, 43 aa, Artificial Sequence
  Synthetic
IHVEVNGVEYKFNNPEQAKKFAEEVAKKLGLTVKVKDGTYRVE

SEQ ID NO: 1736 - protein, 43 aa, Artificial Sequence
  Synthetic
DDELTKEVQELLKNGVDDEQIKEILKRNGVSDEEVRRVLEKAK

SEQ ID NO: 1737 - protein, 43 aa, Artificial Sequence
  Synthetic
TTVHINGVTYHFDNPEQAKKFAKEMAKKQGLKVEIHGNTIEVH

SEQ ID NO: 1738 - protein, 40 aa, Artificial Sequence
  Synthetic
QVTFHTEGEEAAMRIMKHLQAHNLDVKVEVHNGKWVITAD

SEQ ID NO: 1739 - protein, 43 aa, Artificial Sequence
  Synthetic
IQVHVDGVTYHFDNPEEAKKFLARILKEQQRTVELHNGQYHVK

SEQ ID NO: 1740 - protein, 43 aa, Artificial Sequence
  Synthetic
DEEELQREVEKAVKNKDEDKVEELLRRQGYSDEEVEKIVKRLV

SEQ ID NO: 1741 - protein, 43 aa, Artificial Sequence
  Synthetic
VTVRWNGYEYTFSNPEQAEKLAKEVAKKLNLKVELHGNTWHIE

SEQ ID NO: 1742 - protein, 43 aa, Artificial Sequence
  Synthetic
SPKAEELAKKLKKKGYSPDEIREALKKLGVSPEDAERVRKKLG

SEQ ID NO: 1743 - protein, 43 aa, Artificial Sequence
  Synthetic
TEKAKRLAKEANKNNLSPEQIRKYLQKAGISDDEIDKVLKELS

SEQ ID NO: 1744 - protein, 43 aa, Artificial Sequence
  Synthetic
TQVTVGDTTYTFPTPEEAKKFAKKVAKKLNKTVHIDGNRIEVH

SEQ ID NO: 1745 - protein, 40 aa, Artificial Sequence
  Synthetic
SETYTVDGEEQVKKMIKMAKERNLEVRVKVENGKYIIEFH

SEQ ID NO: 1746 - protein, 43 aa, Artificial Sequence
  Synthetic
DEEVERIVERLVKNGVSPEEIKEILKRQGVSEEEVRKALKKAL

SEQ ID NO: 1747 - protein, 43 aa, Artificial Sequence
  Synthetic
PDEARKIVKRLQDQGVSDDEVREILKRYGVSPEEVDKVIKQVK

SEQ ID NO: 1748 - protein, 43 aa, Artificial Sequence
  Synthetic
ATVEVNGVQYDFPNPEEAKKFAEEMARKLGLKLELHGNTWKVE

SEQ ID NO: 1749 - protein, 40 aa, Artificial Sequence
  Synthetic
QIHIHVDGEEKAKKLLEMARKRNLRLEIRIENGQVVVTIE

SEQ ID NO: 1750 - protein, 43 aa, Artificial Sequence
  Synthetic
ATVHVGNVTYHFPNPEQAKEFAEKVAKKLGLKLEMHGNTWHVE

SEQ ID NO: 1751 - protein, 43 aa, Artificial Sequence
  Synthetic
STLTVNGTTLHFPSLDAAKEAAEKIAQKYNLTYEVHGNKVTVK

SEQ ID NO: 1752 - protein, 43 aa, Artificial Sequence
  Synthetic
DDRKERLKEVIRRYPGDEDRVKEVAKKLGVDPREVEELIRRVS

SEQ ID NO: 1753 - protein, 43 aa, Artificial Sequence
  Synthetic
GTVHLGDYTYQYPNPQAAIKAAKKLAKKYNLKVEVHGNTVKVE

SEQ ID NO: 1754 - protein, 43 aa, Artificial Sequence
  Synthetic
NDDAKEIVKELKRQGVDPREVEKVLKRLGVSPEEVKRVKDEVM

SEQ ID NO: 1755 - protein, 43 aa, Artificial Sequence
  Synthetic
YEELEKKARELVKNGVDEKEVKEVLKRAGVDDRQVEKIIRELK

SEQ ID NO: 1756 - protein, 43 aa, Artificial Sequence
  Synthetic
AQVDVQGVKYQFDNPEEAKKFAKEVAKKRNLKIEFHGNTIRVE

SEQ ID NO: 1757 - protein, 43 aa, Artificial Sequence
  Synthetic
GTVKVNGKKITFPSVKAAREWAQKAAKKLGLQYHISGNTVTVT

SEQ ID NO: 1758 - protein, 43 aa, Artificial Sequence
  Synthetic
TTVHVGNYTYTFDTPEQAKKFAEQIAKELNLRVEFHGDTIHVE

SEQ ID NO: 1759 - protein, 40 aa, Artificial Sequence
  Synthetic
DYEYHVTGEEQAKRVIEWAKRANLEIEVQIHGDDVIIHVR

SEQ ID NO: 1760 - protein, 43 aa, Artificial Sequence
  Synthetic
TTVHVGNVTYHFDNPEQAERFAKEMAKKLNLQVHVKDGTYRVE

SEQ ID NO: 1761 - protein, 43 aa, Artificial Sequence
  Synthetic
KTVVNGDTTYTFDTPEAAQKAAKKLAKKYNLEVHVHGNTIKLK

SEQ ID NO: 1762 - protein, 43 aa, Artificial Sequence
  Synthetic
TTVDVGNYQFHFDNPEEAKKFADKMAKDLGGTWTLEGNTFKVE

SEQ ID NO: 1763 - protein, 43 aa, Artificial Sequence
  Synthetic
TTVHVGNITFTAPNPEEALKFAQEIAKKYNGTVHIKNGKITVK

SEQ ID NO: 1764 - protein, 43 aa, Artificial Sequence
  Synthetic
ATVDIQGITYHFSSPEQAKKFAEEWAKRYNLRIEVHNGKFKVE

SEQ ID NO: 1765 - protein, 43 aa, Artificial Sequence
  Synthetic
DEEELKRQLIEVLRQGDEERFKKVVKRLGVSDDEAKKIVRDLS

SEQ ID NO: 1766 - protein, 40 aa, Artificial Sequence
  Synthetic
TTTITVTDETEARKVSEEAKRRGLEVHVTQDNGEWRVEIR

SEQ ID NO: 1767 - protein, 43 aa, Artificial Sequence
  Synthetic
RDQEEKDLKELWKRGVSEEEIRRWAEKQGISRDVVEKAKKEYL

SEQ ID NO: 1768 - protein, 43 aa, Artificial Sequence
  Synthetic
NQVHVNGLTYQFDNPEQARKFAEKVAKELGLRVEMHNGHFHIE

SEQ ID NO: 1769 - protein, 43 aa, Artificial Sequence
  Synthetic
DEKVRKIIEKLLREGVSDEEVTRILQRQGVDDRQVEKVLREVK

SEQ ID NO: 1770 - protein, 43 aa, Artificial Sequence
  Synthetic
PDEQKKREARRLAKEGNREKARKLLQKAGVSEEEAEKIIREAG

SEQ ID NO: 1771 - protein, 43 aa, Artificial Sequence
  Synthetic
TTVNVNGKEIEYPSLEEAEEAAKKIAKKLNLDITIKNNKITIK

SEQ ID NO: 1772 - protein, 40 aa, Artificial Sequence
  Synthetic
EYELTFDGQEQAKKALDHAKKANLHAELRVENGKYIVKFS

SEQ ID NO: 1773 - protein, 43 aa, Artificial Sequence
  Synthetic
NTVDVNGVKYDFETPEKAKKFAEKVAKELGLRVELHNGEFRIE

SEQ ID NO: 1774 - protein, 43 aa, Artificial Sequence
  Synthetic
PDELRKLVRKLAKNGYDPDQIRQILKDLGLSEELAEKLIQEAL

SEQ ID NO: 1775 - protein, 43 aa, Artificial Sequence
  Synthetic
ATVHIGNVTYHFSSLEQAKEFAKKMAEKLNLQVHLKNGHLEMH

SEQ ID NO: 1776 - protein, 40 aa, Artificial Sequence
  Synthetic
ERTIHADSPEKAQKIAKKWQKNGLDVTVEKRNGTFVVRVK

SEQ ID NO: 1777 - protein, 43 aa, Artificial Sequence
  Synthetic
DEEVERLIRELLRNGVDREQVVKIVKDQGVDEEEVRRLVERIL

SEQ ID NO: 1778 - protein, 43 aa, Artificial Sequence
  Synthetic
QTVVIGDTTYHLNNPEAAQQIAKELAKKYGLKVVISGNTIKLK

SEQ ID NO: 1779 - protein, 43 aa, Artificial Sequence
  Synthetic
GTVHVGNETYHFDNPQKAIEFAKKVAKKRNLTVEVHGNTITVK

SEQ ID NO: 1780 - protein, 40 aa, Artificial Sequence
  Synthetic
TEEYTYTDKRLAETAARELAKRGQRVHLYDVNGQWVVRRE

SEQ ID NO: 1781 - protein, 43 aa, Artificial Sequence
  Synthetic
DDEQEKLVQELVRKNVSEEQIEKILKRANVDDRIIEKAKRLLR

SEQ ID NO: 1782 - protein, 43 aa, Artificial Sequence
  Synthetic
IEEVKKIIEELLRRGVDKEQVVEIVKRQGADEKEVRELVERIA

SEQ ID NO: 1783 - protein, 43 aa, Artificial Sequence
  Synthetic
SEKAKRIIEQLWKDGVSKDEIRKEARKLGVSDEQADRILKELG

SEQ ID NO: 1784 - protein, 43 aa, Artificial Sequence
  Synthetic
DERLEQIVRELRDRGVDRRQIEEILRRQGVDPRQVEHVVKKVL

SEQ ID NO: 1785 - protein, 40 aa, Artificial Sequence
  Synthetic
SVEYEFEGEEKARRFMEEMKRRNLEARIRVENGKYIVQVS

SEQ ID NO: 1786 - protein, 43 aa, Artificial Sequence
  Synthetic
DEKEKKIERLAKELGVDKRIIKKLLDDGYSDEQVQRIVKRQQS

SEQ ID NO: 1787 - protein, 43 aa, Artificial Sequence
  Synthetic
ATVHVNGVQYDFRNLEEADKFAKEMAKKLGLTIEYRGETIHVE

SEQ ID NO: 1788 - protein, 43 aa, Artificial Sequence
  Synthetic
TQVHLGGYTYHFSNPEEAKKFALEYAQKANLEIRVHGNRIEVH

SEQ ID NO: 1789 - protein, 40 aa, Artificial Sequence
  Synthetic
QETYTFDGEEAARKFEKEAKKKNLEVEVEKHGDKWVVHVK

SEQ ID NO: 1790 - protein, 40 aa, Artificial Sequence
  Synthetic
EETYTFDGEEQAVKAMKKWRKQNYNVEIHVENGKWKVTVK

SEQ ID NO: 1791 - protein, 43 aa, Artificial Sequence
  Synthetic
PEDVEKIIRQLLDDGVSEDEVREILQRLGVDDRQIEEVIRKVR

SEQ ID NO: 1792 - protein, 40 aa, Artificial Sequence
  Synthetic
TEEYTVTDRREAERLARELKKKGLTVDVQEENGTFRVRVG

SEQ ID NO: 1793 - protein, 43 aa, Artificial Sequence
  Synthetic
QTVHNGDQTYHFDNPEEAKKWAQKLAKEYNLTYTVEGNTVTVK

SEQ ID NO: 1794 - protein, 43 aa, Artificial Sequence
  Synthetic
KTVHLGNLTWHFNNPEEAKEFAKKLAKDVGRQVHIHGDEIHIE

SEQ ID NO: 1795 - protein, 43 aa, Artificial Sequence
  Synthetic
QESAEEKFERAIRNGLSPEEAKKILKKEGYSPDEIEKAARNVT

SEQ ID NO: 1796 - protein, 43 aa, Artificial Sequence
  Synthetic
QTVHNNGETYHFDTPEAAIKFALKLAKKLGLQLEVHGTEVQVH

SEQ ID NO: 1797 - protein, 43 aa, Artificial Sequence
  Synthetic
KTVKVGNTTYTFPTPEKAEKFAKKLAKKLGLTVTKHNGTFKVT

SEQ ID NO: 1798 - protein, 43 aa, Artificial Sequence
  Synthetic
MTVEWNGYQFHFDNPEQAVKFALKVAKEQQLEVKIKDGTIQVE

SEQ ID NO: 1799 - protein, 40 aa, Artificial Sequence
  Synthetic
TETYTYTDKKAAEEAAQKFQRQGLTVEVHKKNGKWEVHVH

SEQ ID NO: 1800 - protein, 43 aa, Artificial Sequence
  Synthetic
ATVHVQGVTYHFDNPEKADKFAKEMAKRLGLELQVHNGQWHVE

SEQ ID NO: 1801 - protein, 43 aa, Artificial Sequence
  Synthetic
TTVHVGNVTYHFNNPEEVKKFVDRIVKELGLTVEYHGDEVRVE

SEQ ID NO: 1802 - protein, 43 aa, Artificial Sequence
  Synthetic
SDETAKKAYEAFKKQQPVTINGLTLKPGSPELEKWYRLFEKIF

SEQ ID NO: 1803 - protein, 43 aa, Artificial Sequence
  Synthetic
TPKELERKAEEAAKNGNKDKARELLERAGYSTEEAERIIRKID

SEQ ID NO: 1804 - protein, 43 aa, Artificial Sequence
  Synthetic
ITVEVNGMEYHFDNPEEVKKFVEKMAKTYNLQVQVHGNKVRIE

SEQ ID NO: 1805 - protein, 43 aa, Artificial Sequence
  Synthetic
DKEVERIVKELLDRGIDPREITKILKRQGVDEEEVKRVIKKVS

SEQ ID NO: 1806 - protein, 43 aa, Artificial Sequence [sequence omitted]

SEQ ID NO: 1807 - protein, 43 aa, Artificial Sequence
  Synthetic
TTVHVNGVTYTFNNPEEAEKFAKKLAKELGMEVKYKDDTFHVE

SEQ ID NO: 1808 - protein, 43 aa, Artificial Sequence
  Synthetic
LERVERIVKDLKKKGVSPEEIKEILRRAGVSEEEVRDVVRRVM

SEQ ID NO: 1809 - protein, 43 aa, Artificial Sequence [sequence omitted]

SEQ ID NO: 1810 - protein, 43 aa, Artificial Sequence
  Synthetic
TTVDVGNVTYHFNNPEEAEKFAKKVAKTYNLRLELHGDKYRIE

SEQ ID NO: 1811 - protein, 43 aa, Artificial Sequence
  Synthetic
KTVHLGDLTYTFDNPEKAIKYAKKLAKIYNLQVTVHGPDITVT

SEQ ID NO: 1812 - protein, 43 aa, Artificial Sequence
  Synthetic
TDELEREAKELADNGVNPQEVREYLKKANADPEVIERVEQYLR

SEQ ID NO: 1813 - protein, 43 aa, Artificial Sequence
  Synthetic
QDEAKKKVERLVRNGVSPKEVKDEARKLGVDERAVEEIIRKVL

SEQ ID NO: 1814 - protein, 43 aa, Artificial Sequence
  Synthetic
LTVDVQGLEYHFDNPEEAKKFVERMAKELNAQVHYKDGTYKIE

SEQ ID NO: 1815 - protein, 43 aa, Artificial Sequence
  Synthetic
TTLHVNGKTYTFPTPELAYKFAAKVAKKKGLKVEQHGNTVKVE

SEQ ID NO: 1816 - protein, 43 aa, Artificial Sequence
  Synthetic
TTVHVNGKTYHFDTTDEAKKFAEKVAKKLGLEVHVKGNTIKLT

SEQ ID NO: 1817 - protein, 43 aa, Artificial Sequence
  Synthetic
DDDKVRKKVQEVLKHGDEDRAKEILRRAGVDPRQVEDLIQKLK

SEQ ID NO: 1818 - protein, 43 aa, Artificial Sequence
  Synthetic
TTVHIQGVTYHFDNPEQALKFAQEMAKKLNLQLEIQGDTLHVE

SEQ ID NO: 1819 - protein, 43 aa, Artificial Sequence
  Synthetic
SDDLRKLVEELLKNGVDPEQIAKIAKKNGLNESEARKLIKEAL

SEQ ID NO: 1820 - protein, 43 aa, Artificial Sequence
  Synthetic
PEEIERHVEELLRRGVSPEEIKEHLKRNGYDEEQVDKVIKKVG

SEQ ID NO: 1821 - protein, 43 aa, Artificial Sequence
  Synthetic
KQVQVGDEKYTFDTPEEARKFAEKVAKEKNLKVTEKNGNFHVE

SEQ ID NO: 1822 - protein, 43 aa, Artificial Sequence
  Synthetic
TPKEEIIKRIAKDLNISEEEARRLAEEANGDESEAKNIWKKKY

SEQ ID NO: 1823 - protein, 43 aa, Artificial Sequence
  Synthetic
SDEAEKIARELWKKGASPDKIRKILKKLGVSPEEADKILKKIL

SEQ ID NO: 1824 - protein, 43 aa, Artificial Sequence
  Synthetic
DDKVVKLFEELKRNGVDERQIREYLKRQGISDEDVKKAKKLVG

SEQ ID NO: 1825 - protein, 43 aa, Artificial Sequence
  Synthetic
DEKEKLLKEAAELLNTDPRQVRELVRQLNLDVEEFVKWVRHES

SEQ ID NO: 1826 - protein, 43 aa, Artificial Sequence
  Synthetic
QEEAERHAKELYKNGVDKRQITEILRRLNVDERVIEKVQRWIG

SEQ ID NO: 1827 - protein, 40 aa, Artificial Sequence
  Synthetic
QIHITVKGQEQADKVIEEMKRRNLKFEVKVDGDDIVIQVD

SEQ ID NO: 1828 - protein, 40 aa, Artificial Sequence
  Synthetic
GYQYTLHGEEAAKKVIEWAKRANLEFKVEHHGDRIIIEAE

SEQ ID NO: 1829 - protein, 40 aa, Artificial Sequence
  Synthetic
SVKYELHGDEQAKKMLEYARRANLRVKLEKENGKWVAELD

SEQ ID NO: 1830 - protein, 43 aa, Artificial Sequence
  Synthetic
STVHVGNVTYHFDKPEQAEKFAKEIAKKLNMQVHIQGDEIHVK

SEQ ID NO: 1831 - protein, 43 aa, Artificial Sequence
  Synthetic
EPRELEKEAKKAIKNGDEDKAREILKKAGYSPQEADEFIKKVL

SEQ ID NO: 1832 - protein, 40 aa, Artificial Sequence
  Synthetic
KETQTYHGTEVALRVLEWAKKANLEVEVEVHGDQYVFHFK

SEQ ID NO: 1833 - protein, 43 aa, Artificial Sequence
  Synthetic
KTVHVDGVTYHFENPEEALKFAKEMAERKGGNYEIHGDTIHVK

SEQ ID NO: 1834 - protein, 43 aa, Artificial Sequence
  Synthetic
GKVTVNGNTFTFPTTDEARKFAKKLAKKLNLPVTIHGNQIQIH

SEQ ID NO: 1835 - protein, 43 aa, Artificial Sequence
  Synthetic
PDELRELLEKLLKNNVSDDELREYAQKLGYSDDAAEKALQELK

SEQ ID NO: 1836 - protein, 40 aa, Artificial Sequence
  Synthetic
EFTVTVEGEEQVRRALEMAKKVNLKADVEVHGDQYVIHFK

SEQ ID NO: 1837 - protein, 43 aa, Artificial Sequence
  Synthetic
TKEQLKIALKAFRNNQPFTLGTTTYTPGSDDAKKLAEKAEKVL

SEQ ID NO: 1838 - protein, 43 aa, Artificial Sequence
  Synthetic
LQVHVDGVTYHFDNPEEAYEFAKRMAESQQRKVEVHNGQFHIE

SEQ ID NO: 1839 - protein, 43 aa, Artificial Sequence
  Synthetic
KEEAKKIVEELQRRGVSEEQIKKILREQGISPEEVDKIVKEVS

SEQ ID NO: 1840 - protein, 43 aa, Artificial Sequence
  Synthetic
DEERLIREALELLRSGDEEKVKEVAKKLGVSPEDVKHLVRQLE

SEQ ID NO: 1841 - protein, 43 aa, Artificial Sequence
  Synthetic
DEHVKRIVERLLRNGVDPKQVKEIAKRNNIDPRIVDKVIKEVS

SEQ ID NO: 1842 - protein, 40 aa, Artificial Sequence
  Synthetic
AIEYQFQGEEQARKFAEEMKRRNLHAELRVENGQYVVHVE

SEQ ID NO: 1843 - protein, 43 aa, Artificial Sequence
  Synthetic
MTVRVDGVDYEFSSLEEAVRFALKMAKSKGAEVQLHNGTFHVE

SEQ ID NO: 1844 - protein, 40 aa, Artificial Sequence
  Synthetic
EMHYTVDGQEQADRLAKKLKAMNYEVHIEIHNGKLVLKAH

SEQ ID NO: 1845 - protein, 43 aa, Artificial Sequence
  Synthetic
SKDAAQYVYDEAQKGVTQVTVNGVTFKFDNWQKLLKYAQKLLN

SEQ ID NO: 1846 - protein, 40 aa, Artificial Sequence
  Synthetic
RITVEVHGEEQLKEVIKRLRDQNLEVHVEHHNGKIIVHAD

SEQ ID NO: 1847 - protein, 43 aa, Artificial Sequence
  Synthetic
REEVEKIVKRLQEKNVSEEEIREILRRNGVDPREVDEAIKRVS

SEQ ID NO: 1848 - protein, 40 aa, Artificial Sequence
  Synthetic
TITITVTDRTNAKKVAEEWLRRGYDVTFTEDNGTVEVRVN

SEQ ID NO: 1849 - protein, 43 aa, Artificial Sequence
  Synthetic
KTVTFNGQHYTFDNPEQAKKFAQEAAKKAGGTVELHNGTWHVQ

SEQ ID NO: 1850 - protein, 43 aa, Artificial Sequence
  Synthetic
DIVEKVETLLRQGKEVRFTYNGQEFTLHPGDPSVEEIIKKIRG

SEQ ID NO: 1851 - protein, 43 aa, Artificial Sequence
  Synthetic
VRVTWDGVNVEFENLEQAQKYAEEVAKKRGGKVHIDGNHIKVE

SEQ ID NO: 1852 - protein, 43 aa, Artificial Sequence
  Synthetic
ITVHMNGVTYHFNNPEEVKKFVEKLAKELQLKVEWHGNTVHIE

SEQ ID NO: 1853 - protein, 40 aa, Artificial Sequence
  Synthetic
TTRLKFTDKEEARRVAEELRKKGYDVTLTEHNGTWEVRSN

SEQ ID NO: 1854 - protein, 43 aa, Artificial Sequence
  Synthetic
EEKKKIIEKLAKKVGVDPELVRRVLEEANGDQERVEKILRQLL

SEQ ID NO: 1855 - protein, 43 aa, Artificial Sequence
  Synthetic
ATVHVDGLEVHFSSPEQAKQFALEMAKKRNLTVEFRGNTIHVK

SEQ ID NO: 1856 - protein, 40 aa, Artificial Sequence
  Synthetic
QVTYTYHGEEAMKRALEELKKRNLEVKVERDGDQFHLHVR

SEQ ID NO: 1857 - protein, 40 aa, Artificial Sequence
  Synthetic
RETRTINGEEAAKKFEEDMRRKNLKVEWHKHGNRIIVHID

SEQ ID NO: 1858 - protein, 40 aa, Artificial Sequence
  Synthetic
EEHYTVEGEEAMKRMIEEAKRRNLKIEVRIENGQIIITLK

SEQ ID NO: 1859 - protein, 43 aa, Artificial Sequence
  Synthetic
EDEVKKIVKRLIENGVDDEQIKEIVKRQGVDERIVDKVLKELK

SEQ ID NO: 1860 - protein, 43 aa, Artificial Sequence
  Synthetic
QPEEYKKKAEEAARRGDKEKARELLKRAGYSEEEAKQIIKKLG

SEQ ID NO: 1861 - protein, 43 aa, Artificial Sequence
  Synthetic
QKVTVDGVNYEFDNPEKAKKFVERMVKEKGGTVELHNGTYHIK

SEQ ID NO: 1862 - protein, 43 aa, Artificial Sequence
  Synthetic
HTVEFNGYQYHFPNPEQVEKFVKRVVKELGLTYEVHGNTIQIE

SEQ ID NO: 1863 - protein, 43 aa, Artificial Sequence
  Synthetic
DEERKKHVEKLLRNGVSDEEVKKILQKLGVSDEEVRKIIERVK

SEQ ID NO: 1864 - protein, 40 aa, Artificial Sequence
  Synthetic
RITMTIEGEEAVEKAIKKARARNLEVHVEKHNGQYIVHVD

SEQ ID NO: 1865 - protein, 43 aa, Artificial Sequence
  Synthetic
HEEEVKKEVQEVVRRGDEDRAREILKKAGFSDEQVDKIIKRYM

SEQ ID NO: 1866 - protein, 43 aa, Artificial Sequence
  Synthetic
YTVEWDGITVEFSSLEEALRFAQKLAKDKGGEVQLHNGTFHVE

SEQ ID NO: 1867 - protein, 43 aa, Artificial Sequence
  Synthetic
SEEEEKRRVEELARQGNEDEARRLAKEAGIDPNYAEQLIQEVK

SEQ ID NO: 1868 - protein, 40 aa, Artificial Sequence
  Synthetic
DITIEVEGEEAAKRIAKAMLDQNLKVEIQIHNGKFILHAS

SEQ ID NO: 1869 - protein, 40 aa, Artificial Sequence
  Synthetic
EEERTFTNEEEARKAKKEAEKRGLRVTVTKDGTTWRVRIG

SEQ ID NO: 1870 - protein, 43 aa, Artificial Sequence
  Synthetic
LEKAERIARKLAKNNQSPKQIEEILRKLGIDEEAIKEAKKKLT

SEQ ID NO: 1871 - protein, 40 aa, Artificial Sequence
  Synthetic
SFEVETEGQEDADKWIKWAQKQNLEYHVTIHGDRAIIRFS

SEQ ID NO: 1872 - protein, 43 aa, Artificial Sequence
  Synthetic
SDKERQILQDLLNNGASQDEIEEEARKAGVSEEAIQRFLEEIG

SEQ ID NO: 1873 - protein, 40 aa, Artificial Sequence
  Synthetic
KVTFHVHGEEAAKKVVKMLQDRNLDVKWEKQGDRIIITAE

SEQ ID NO: 1874 - protein, 43 aa, Artificial Sequence
  Synthetic
ITVHIGNVTYHFNNPEEVKKFAKEMAEKLNMEVHIHGNEVHVQ

SEQ ID NO: 1875 - protein, 43 aa, Artificial Sequence
  Synthetic
PKEKLEKIARKLVSKGNEEKARRALRKAGFSEEEIERIEREVK

SEQ ID NO: 1876 - protein, 43 aa, Artificial Sequence
  Synthetic
SEELRKTVEDLKKRGYSPDQIVDILRKNGVDPRELEKVERELK

SEQ ID NO: 1877 - protein, 43 aa, Artificial Sequence
  Synthetic
TTVHVNGVTYHFNNPEEVEKFARKLAKEVGLQIKVENGHLKME

SEQ ID NO: 1878 - protein, 43 aa, Artificial Sequence
  Synthetic
GTVHVNGLTYHFSNPEEAKKFAKEVAKKLGLTVQMKDDTWHIE

SEQ ID NO: 1879 - protein, 43 aa, Artificial Sequence
  Synthetic
TKEEAERRAEEAVRNGNDDKARKLLEKAGISPDEADEWIERVK

SEQ ID NO: 1880 - protein, 43 aa, Artificial Sequence
  Synthetic
NTVILDGKKFKFPSLEAAQKWAKEVANKRNLTVKTHGNTVKIH

SEQ ID NO: 1881 - protein, 40 aa, Artificial Sequence
  Synthetic
TETRTYTNETEARRIVEELRRRGYDVQVTEDNGKWTVTRR

SEQ ID NO: 1882 - protein, 43 aa, Artificial Sequence
  Synthetic
QTVQLGNLEYHFDNPEQAQKFAKELAERYNLQVKLDNGTLKFE

SEQ ID NO: 1883 - protein, 43 aa, Artificial Sequence
  Synthetic
KEEEAKKKAKKALDEGNEELAEKILKKYNVDPEQVKKEWKKER

SEQ ID NO: 1884 - protein, 43 aa, Artificial Sequence
  Synthetic
TELKKKLEEALKKGEEVRVKFNGIEIRITSEDAARKAVELLEK

SEQ ID NO: 1885 - protein, 40 aa, Artificial Sequence
  Synthetic
EITITNDGEEQMKAVVKWARKANLRAEVEVHNGKWVVHIK

SEQ ID NO: 1886 - protein, 43 aa, Artificial Sequence
  Synthetic
QEVHVGDTTYHFDNPEEAIKFAQKLAKKLHVPITIDGNKVTVG

SEQ ID NO: 1887 - protein, 43 aa, Artificial Sequence
  Synthetic
NTVQVNGVKYDFNNPEEVEKFAKEVAKKLNLTIKVENGTWKVE

SEQ ID NO: 1888 - protein, 40 aa, Artificial Sequence
  Synthetic
SIHFEVEGEEQARKIQKDMAKKNYHVEVHVENGKWVVKAD

SEQ ID NO: 1889 - protein, 43 aa, Artificial Sequence
  Synthetic
TTVKVNGVQYDFDNPEEAEKFAKELAKKLNLEVHYKDGTFNVE

SEQ ID NO: 1890 - protein, 43 aa, Artificial Sequence
  Synthetic
LTVQFNGLEYHFDNPEKAKKFAQEVAEKLNLRVELHGNTIHIE

SEQ ID NO: 1891 - protein, 43 aa, Artificial Sequence
  Synthetic
PKDEARKKAEKALRSGNEDKAEEILRRAGVSEDDIQEIKDRLG

SEQ ID NO: 1892 - protein, 43 aa, Artificial Sequence
  Synthetic
LDEVRKKVEELLRQGVSPEQITKQLRKAGVDDEQVKKIIRELS

SEQ ID NO: 1893 - protein, 43 aa, Artificial Sequence
  Synthetic
PEDAEEIAKELKKRGVSPDEIREILKKAGASEDEAEKIIKKLA

SEQ ID NO: 1894 - protein, 43 aa, Artificial Sequence
  Synthetic
LTVHVNGVTYHFNNPEEADKFAKKMAKDLGGRVELHNGTYHVK

SEQ ID NO: 1895 - protein, 43 aa, Artificial Sequence
  Synthetic
DEDAKRRLEELVRNGVDDEQLKDIARKLGLDDRVVEEIKRRVH

SEQ ID NO: 1896 - protein, 43 aa, Artificial Sequence
  Synthetic
VDEAKKLAEELVRRGVSREEVKEALKRAGVSDEEVERIVRELM

SEQ ID NO: 1897 - protein, 40 aa, Artificial Sequence
  Synthetic
TTTLQFDDKKEAQKAYQKFAQQGLEVHVTQENGTWQVHVK

SEQ ID NO: 1898 - protein, 43 aa, Artificial Sequence
  Synthetic
QTLEVNGQTIQFPSPDAAKKAAKKFAKKYGLTVEVHGNTIKIK

SEQ ID NO: 1899 - protein, 40 aa, Artificial Sequence
  Synthetic
SIKITTDGEEQARKVYKYLANQNLDVKLKVENGKFIIQAD

SEQ ID NO: 1900 - protein, 43 aa, Artificial Sequence
  Synthetic
TWQDLAKKALKAAKKGQKLTINGITVTSKDAAKWLEEWLKKYA

SEQ ID NO: 1901 - protein, 43 aa, Artificial Sequence
  Synthetic
LEEVAKAVKKAASKGITEITIGDQTFHFTNPQKAYEWAAKLLK

SEQ ID NO: 1902 - protein, 43 aa, Artificial Sequence
  Synthetic
DEKVERIVREARKRNLDEEQIRDEVRRLGVDEKKVDEIVKLVK

SEQ ID NO: 1903 - protein, 43 aa, Artificial Sequence
  Synthetic
SDDVRRLAEELLRNGVSPEEAKKILKKLGVTPDEAEQAVREVL

SEQ ID NO: 1904 - protein, 40 aa, Artificial Sequence
  Synthetic
SITIRVRGKEQAMKAMKKARARNLEVEIQRHGDEWIIHVD

SEQ ID NO: 1905 - protein, 43 aa, Artificial Sequence
  Synthetic
IIEEVIKKLEEVVKKNQTVTVGNRTIDDPNEVETLVKQLRKKL

SEQ ID NO: 1906 - protein, 43 aa, Artificial Sequence
  Synthetic
YKVQVNGVEYKFDKPEQVEKFVKEVAKKLGLQYEFHGNTVHIE

SEQ ID NO: 1907 - protein, 43 aa, Artificial Sequence
  Synthetic
TQVDVDNVTYHFDNPEEAKKFALEVAKKKGGQVELKDGTFKVK

SEQ ID NO: 1908 - protein, 40 aa, Artificial Sequence
  Synthetic
TYTFTVQDSEQAKKAQKWAKKNNLEVHVEQHNGTYKITVH

SEQ ID NO: 1909 - protein, 43 aa, Artificial Sequence
  Synthetic
QDYEKIAQEIIKKAGGDYDKAREIAKRLGNEEARRYIEEEARK

SEQ ID NO: 1910 - protein, 43 aa, Artificial Sequence
  Synthetic
DEELEDQVRKLLENGVSKDQVKEILRRQGVSDEEVKKIIRRAE

SEQ ID NO: 1911 - protein, 43 aa, Artificial Sequence
  Synthetic
ATVHIDGVKYEFDEPEQAKKFAKEVAEKLGMQMHIDGNTVHVK

SEQ ID NO: 1912 - protein, 40 aa, Artificial Sequence
  Synthetic
TQTFEYQDPEQAKKAAKKLKEKGLEVHITERNGTFHLTVH

SEQ ID NO: 1913 - protein, 43 aa, Artificial Sequence
  Synthetic
GTVTFRGQTIKFPTDEEAIKFAKKAAKKLNLTVHVHNGKITLK

SEQ ID NO: 1914 - protein, 43 aa, Artificial Sequence
  Synthetic
ITVHVDGVTYHFNNPEEVKKFVERVAKEKGLKVEVHNGTFHVE

SEQ ID NO: 1915 - protein, 43 aa, Artificial Sequence
  Synthetic
DDEVKKIWKRLKRNGVSDEEVKRILKRQGVDPRQIKKVDKDLS

SEQ ID NO: 1916 - protein, 43 aa, Artificial Sequence
  Synthetic
IEEVEDLVRRLLENGVSPDQVREILQRNGIDPRAVERALQRVS

SEQ ID NO: 1917 - protein, 43 aa, Artificial Sequence
  Synthetic
PEEEAKRRAEEALDRGDEDKARKILEKAGISPEEAQKVIDKLR

SEQ ID NO: 1918 - protein, 43 aa, Artificial Sequence
  Synthetic
NKDELKERIKKALSSGNDDKAKELAKKAGVSEEEVKELKKRIL

SEQ ID NO: 1919 - protein, 43 aa, Artificial Sequence
  Synthetic
EEEIRKTIERLLRNGVDPHEIRKELQKRGIDDRQIEEVLRKVK

SEQ ID NO: 1920 - protein, 43 aa, Artificial Sequence
  Synthetic
AQVQYNGITVQFNNPEEAYKYAKEVAEKLQGKLELKDGTIQIK

SEQ ID NO: 1921 - protein, 43 aa, Artificial Sequence
  Synthetic
DEKVERIVEKLLKNGVSKEQIKEILKRNGVDDREVEEVLRKLD

SEQ ID NO: 1922 - protein, 43 aa, Artificial Sequence
  Synthetic
PEKYKEIAQKLYDNGVTIDEVKKILEKLGLTPELAERAARAVE

SEQ ID NO: 1923 - protein, 40 aa, Artificial Sequence
  Synthetic
SITITFEGEEDAKKMIEEMKKRNLEFEVEQRGDRWVITVH

SEQ ID NO: 1924 - protein, 40 aa, Artificial Sequence
  Synthetic
RVEYHVHGEEQMRRVVEKLKRQNLEVHWRVENGRYIIQAE

SEQ ID NO: 1925 - protein, 43 aa, Artificial Sequence
  Synthetic
RDEVKKRVEKLQRNGVDEEQIKEILKRLGFSDEEVRKILEDVK

SEQ ID NO: 1926 - protein, 43 aa, Artificial Sequence
  Synthetic
SLEEALERAKEALKKNQPLEVNGYRFDDPRKAYEWAREQLERA

SEQ ID NO: 1927 - protein, 43 aa, Artificial Sequence
  Synthetic
PKEELKKEAEKALRNGNKDKAREILERAGLSTEQAERILRKLK

SEQ ID NO: 1928 - protein, 43 aa, Artificial Sequence
  Synthetic
RDEDAKRTVEELLRRGNEEKAEEVARQAGISDDELKELKKRAS

SEQ ID NO: 1929 - protein, 43 aa, Artificial Sequence
  Synthetic
RQEDLERKAREAARQGNKDLARKILEKAGYTDDQVEKVWQEVQ

SEQ ID NO: 1930 - protein, 40 aa, Artificial Sequence
  Synthetic
SIRIEVEGQEKAHRIWQMLADRNLDVKITIHGDKAVVKAD

SEQ ID NO: 1931 - protein, 43 aa, Artificial Sequence
  Synthetic
IQVHVNGVTFEFSNPEEMLKFVKEVAKQLGRTWELKDGHVHVE

SEQ ID NO: 1932 - protein, 40 aa, Artificial Sequence
  Synthetic
TKTLTVTDTTEAERVARELKKRGITFRREERNGTYHFEYD

SEQ ID NO: 1933 - protein, 43 aa, Artificial Sequence
  Synthetic
RTVHVNGLTYHFDNPEQAKKFAKKVAKELGLTMQLHGNTIHVE

SEQ ID NO: 1934 - protein, 43 aa, Artificial Sequence
  Synthetic
LEEVEREVHELVKNNVDERQIKERLRRLGVSEEEVQRIIKKAK

SEQ ID NO: 1935 - protein, 43 aa, Artificial Sequence
  Synthetic
TTVHVGNYTYHFDNPEQVYKFALEMAKKKGLQVHIHGETIHVE

SEQ ID NO: 1936 - protein, 43 aa, Artificial Sequence
  Synthetic
KHVHVNGVTYTFSSLEQARKWAEEVAKKLNLRVELHNGHFHVE

SEQ ID NO: 1937 - protein, 43 aa, Artificial Sequence
  Synthetic
KQVKVNGQKFQFDTPEKAEKFAKKVAQKLNGTVTLKNGQFEVH

SEQ ID NO: 1938 - protein, 43 aa, Artificial Sequence
  Synthetic
GTVYVGNEEYKFPTPELAKKAAEKFAKKYNLTVHTDGNKFEVK

SEQ ID NO: 1939 - protein, 43 aa, Artificial Sequence
  Synthetic
SEEVKKIVKELQKHNVDKRQIVEILRRQGVDERDVERVVRELS

SEQ ID NO: 1940 - protein, 43 aa, Artificial Sequence
  Synthetic
DERVERIVRQLLRNGYSEEQVKEILERLGIDPREVKKVLDEIS

SEQ ID NO: 1941 - protein, 43 aa, Artificial Sequence
  Synthetic
AQVHLGGYTYHFPNPQDALRFALEYAKKHNRQVEVHGEQVKVK

SEQ ID NO: 1942 - protein, 43 aa, Artificial Sequence
  Synthetic
DDEIKELAKKLKENNVDEEQIKEKAKRLGLDDDQVKKLVDLVR

SEQ ID NO: 1943 - protein, 40 aa, Artificial Sequence
  Synthetic
DIKIEVEGEEIARRIADKARKKNLEAHVTVENGKWVVHIR

SEQ ID NO: 1944 - protein, 43 aa, Artificial Sequence
  Synthetic
PDEEKELQELADRLNIDPSEVERALKEANGNVDEAKKILKKIA

SEQ ID NO: 1945 - protein, 43 aa, Artificial Sequence
  Synthetic
PWKKAVQLLEEAAKRGEPITVNGVDITSPEEAKKLAQHLKEKY

SEQ ID NO: 1946 - protein, 43 aa, Artificial Sequence
  Synthetic
TPEAQRLAKELQKNGVSKREAEEILKRAGLSPDQVKEALKAVF

SEQ ID NO: 1947 - protein, 43 aa, Artificial Sequence
  Synthetic
SEVNLNGKTYEFPSPEEAKKFAQKVAKKYQLTYTQTNGTITIK

SEQ ID NO: 1948 - protein, 43 aa, Artificial Sequence
  Synthetic
GTVHVNGETYTFDNPQEAYKFALELAKKLGLTVHLQNNTVEVH

SEQ ID NO: 1949 - protein, 43 aa, Artificial Sequence
  Synthetic
TDEAERIARELLKNGFSPEEIKNILKKNGFSPDDAQEAVEKAV

SEQ ID NO: 1950 - protein, 43 aa, Artificial Sequence
  Synthetic
DEEAKKLAEELLKRGVSKEEIERIASKQGLDRNAVRKFLKNVG

SEQ ID NO: 1951 - protein, 43 aa, Artificial Sequence
  Synthetic
NQEDAKEKAKQLAKDGDPDKARELLQRAGLSEEEVQRIYKKLV

SEQ ID NO: 1952 - protein, 43 aa, Artificial Sequence
  Synthetic
QKVNVGDTTYHFESPEQAQKFAKKLAKELNLTVHIKGNTVTVK

SEQ ID NO: 1953 - protein, 40 aa, Artificial Sequence
  Synthetic
TSTYKFDDKTQAETFAEKARRNGLDVQITEDNGTWEVEVR

SEQ ID NO: 1954 - protein, 40 aa, Artificial Sequence
  Synthetic
SITYHVHGEEIARKLEKLMRKHNLEVHVKVENGEWIITAD

SEQ ID NO: 1955 - protein, 43 aa, Artificial Sequence
  Synthetic
SQDEAEKEARQALKDGDEDRAREIARRAGFDDEWVDRLKKEVV

SEQ ID NO: 1956 - protein, 43 aa, Artificial Sequence
  Synthetic
DDRVDKIADELYKNGVSPEEIERILRRAGVDDELLKQVKRKVF

SEQ ID NO: 1957 - protein, 43 aa, Artificial Sequence
  Synthetic
DEKLEKHVRELKKNGVDPEQVKEILRRLGASDEEVEEIVRRVF

SEQ ID NO: 1958 - protein, 40 aa, Artificial Sequence
  Synthetic
TTRYHYTDKNEATRAKEEAERKGLRVTLKQENGQWFVEID

SEQ ID NO: 1959 - protein, 40 aa, Artificial Sequence
  Synthetic
SLHYTMHGEEQARKMVEELRRRNYDAKVRVENGRWIVQAD

SEQ ID NO: 1960 - protein, 40 aa, Artificial Sequence
  Synthetic
TTTYTLDSEDAARTAATEWRNRGYDVTVTQENGTWKIHVK

SEQ ID NO: 1961 - protein, 43 aa, Artificial Sequence
  Synthetic
REKEKQAEELIRRAGGDWKKAKKLAKKNGDPELSQAIEEFAKG

SEQ ID NO: 1962 - protein, 43 aa, Artificial Sequence
  Synthetic
TEKVRRIVEKVKKSGVSEEELDKILKRLGISDEQIKEAKRLYN

SEQ ID NO: 1963 - protein, 43 aa, Artificial Sequence
  Synthetic
TDEVVKEAQELYKRGVDPRQIEEQLRRKGVSEEEIKKVKRAIS

SEQ ID NO: 1964 - protein, 43 aa, Artificial Sequence
  Synthetic
KTVDVNGMEYHFPNPEEAKKFALEMAKKLNLRIEFHGDTIKIE

SEQ ID NO: 1965 - protein, 43 aa, Artificial Sequence
  Synthetic
KTVHVNNVTYHFENPEQAVKFAREMAKKSNLKIEFHGDTIHIE

SEQ ID NO: 1966 - protein, 43 aa, Artificial Sequence
  Synthetic
TTVHVNGVQYDFDNPEQAERFAKEIAKKLQLTLEVRGNTWHVE

SEQ ID NO: 1967 - protein, 43 aa, Artificial Sequence
  Synthetic
ATVHINGMEYHFDEPEQAKEFAEKVAKKLGLKIEFHGNTIKVE

SEQ ID NO: 1968 - protein, 43 aa, Artificial Sequence
  Synthetic
AEVHVGDVTYKFDNPQQAEKFAKEVAKKLGGTVEVHGETFKVK

SEQ ID NO: 1969 - protein, 40 aa, Artificial Sequence
  Synthetic
GQTFDVKGDEAARKMVEILQAQNLKVKWEKRNGQIIIHVE

SEQ ID NO: 1970 - protein, 40 aa, Artificial Sequence
  Synthetic
AVTYENPGQEAAEKMLEWAKKQNLEVHVRREGDKFILTIE

SEQ ID NO: 1971 - protein, 43 aa, Artificial Sequence
  Synthetic
REDEAREEVKKLIKSGNPEEAERLAEELGISREEVKKIKKEIG

SEQ ID NO: 1972 - protein, 43 aa, Artificial Sequence
  Synthetic
SDEEITQRAEELIKKYSKDEVKEILRQEGVDEEQAQQAIERVG

SEQ ID NO: 1973 - protein, 43 aa, Artificial Sequence
  Synthetic
ITEENIKHVEEVVKKGEPVTVDGQTITDPEKLKEVIERLRKKL

SEQ ID NO: 1974 - protein, 43 aa, Artificial Sequence
  Synthetic
TKVEVQGVEYTFNNPEEAVKFALEVAKKANLKIEFHGNEIKIE

SEQ ID NO: 1975 - protein, 40 aa, Artificial Sequence
  Synthetic
QIQIHVDGEEKAHRIAEDLKRKNLEVHVEKHNGQWVVKAE

SEQ ID NO: 1976 - protein, 43 aa, Artificial Sequence
  Synthetic
KEVDVNGVTFRFDNPEDAKRFAQEMAEKLGRRVEIHGDTIKVE

SEQ ID NO: 1977 - protein, 43 aa, Artificial Sequence
  Synthetic
TTVHVGNYTYTFNNPEQVKKFVERLAKELQLQVHIHGDEIHVE

SEQ ID NO: 1978 - protein, 43 aa, Artificial Sequence
  Synthetic
TTVHVQGVTYHFSSPEEAKEFADKIAKKLGLKLEIHGNQLKVE

SEQ ID NO: 1979 - protein, 43 aa, Artificial Sequence
  Synthetic
SQEEAKRKAEKLLKEGNQEKAERALRSAGVTEQEIQEWIEKVK

SEQ ID NO: 1980 - protein, 43 aa, Artificial Sequence
  Synthetic
TTVEVDGVQYHFDNPEKALKFALEVAKSKQRQIKIKDGTFRIE

SEQ ID NO: 1981 - protein, 43 aa, Artificial Sequence
  Synthetic
HTVKVNNKTYTFDNPEEAQQFAEKVAKELGLKVHKHNGTFEVH

SEQ ID NO: 1982 - protein, 43 aa, Artificial Sequence
  Synthetic
TTVKVNGQEVKLNLSPEQAAQWAKEAYPGAEVRIHGNTVKVKQ

SEQ ID NO: 1983 - protein, 43 aa, Artificial Sequence
  Synthetic
PRDVARKVWELEQQGVSRSELQEFIRQANLDEDLIEELIKELY

SEQ ID NO: 1984 - protein, 43 aa, Artificial Sequence
  Synthetic
SEEEELRKAAEALKNGDDETLQKIAKKLNLTEDEVREKAQRII

SEQ ID NO: 1985 - protein, 43 aa, Artificial Sequence
  Synthetic
DPEAEKTVEKLFKNGVSPDEIRRWAKEQGFDPSRAEEIIERAR

SEQ ID NO: 1986 - protein, 43 aa, Artificial Sequence
  Synthetic
KTVVIGNTTYTAPSPDEAKKIAEKLAKKYNLTVTKTGGYWIVK

SEQ ID NO: 1987 - protein, 43 aa, Artificial Sequence
  Synthetic
ITVHVNGLEYHFNNPEEAKKFAEEMAKQLGLQLKVENGTFKIE

SEQ ID NO: 1988 - protein, 43 aa, Artificial Sequence
  Synthetic
VEELQKVVEKLLKNGVDEEQVKEILKRLGASDEEVDRVVKEVG

SEQ ID NO: 1989 - protein, 43 aa, Artificial Sequence
  Synthetic
PEEIKRIVEKLQRNGVDDRQVEEILKRQGVDPREVEKVIREVK

SEQ ID NO: 1990 - protein, 40 aa, Artificial Sequence
  Synthetic
SITVTVHGEEQMKRVIEMLRQQNLEVHVEIRGDQIHITAE

SEQ ID NO: 1991 - protein, 43 aa, Artificial Sequence
  Synthetic
DEDVRKLIEDLLRQGVDEEQVKRIVKRQGVDPREIERLLRELS

SEQ ID NO: 1992 - protein, 43 aa, Artificial Sequence
  Synthetic
DEKAQRIVKDLLKKGVSEDEIREILKRAGVSDEAVEKAIQQAF

SEQ ID NO: 1993 - protein, 43 aa, Artificial Sequence
  Synthetic
PEDAKELAKRLAKKGVSPEEIRKILENKGVSTDEAKKALKEIS

SEQ ID NO: 1994 - protein, 43 aa, Artificial Sequence
  Synthetic
TTVTFNGETYTFPTTEEAEQFAQEAAKKANLKVTKIGNYWKLE

SEQ ID NO: 1995 - protein, 43 aa, Artificial Sequence
  Synthetic
DEDAEKIFKELQKNGVDDRQVQEILRRLGVDPRIVEEIERRAR

SEQ ID NO: 1996 - protein, 40 aa, Artificial Sequence
  Synthetic
SITYESSGPEQAKKIEEELRKRNLKVEIQIHNGKWVLHAE

SEQ ID NO: 1997 - protein, 43 aa, Artificial Sequence
  Synthetic
EREKARIVLEAAKKGVSHINIGDETIEVGSPRWQELKKIYEEY

SEQ ID NO: 1998 - protein, 40 aa, Artificial Sequence
  Synthetic
KFTITVEGEEAAKRVMKYAKKQNLEVHVKVENNRYIITAE

SEQ ID NO: 1999 - protein, 43 aa, Artificial Sequence
  Synthetic
PNEDKKRKAKELLKEGNEEKAERLLRKAGVSEEEIKRIKKEVG

SEQ ID NO: 2000 - protein, 40 aa, Artificial Sequence
  Synthetic
TTTIETTDEETARRIAKELRKNGLEVRVQKDGNKFKVEVR

SEQ ID NO: 2001 - protein, 43 aa, Artificial Sequence
  Synthetic
GTVHINGQEYTFPNPEEAYKYAKKAAEKLGLTVKLFGNTVQVH

SEQ ID NO: 2002 - protein, 43 aa, Artificial Sequence
  Synthetic
SRELEKIAEKLLKNGVSPDEAIEYLKSLGVSDEEARQIVERAL

SEQ ID NO: 2003 - protein, 40 aa, Artificial Sequence
  Synthetic
KITIHTDGEEDAKRVIEYAQRQNLEYHVEVHNGQWVIHLS

SEQ ID NO: 2004 - protein, 43 aa, Artificial Sequence
  Synthetic
DEEAERVVRELKKNNVDKEEIKEILRRLGVSEEEVQKIVKKVG

SEQ ID NO: 2005 - protein, 43 aa, Artificial Sequence
  Synthetic
TSEELKRKAEKAARNGNKDKARELLERAGYNPDEAEKILQKIG

SEQ ID NO: 2006 - protein, 40 aa, Artificial Sequence
  Synthetic
TETYKYDDKREAEKAAEEFRRRGITVTVEERNGTWVLESK

SEQ ID NO: 2007 - protein, 43 aa, Artificial Sequence
  Synthetic
NKEELERRARKAAKNGNEEKARRLLQKAGFSDEQASRIIKEVI

SEQ ID NO: 2008 - protein, 43 aa, Artificial Sequence
  Synthetic
TTVEIGDTTYTFPTAEEAYKYAKKLAEKAGLTVQQHGNTVKVE

SEQ ID NO: 2009 - protein, 43 aa, Artificial Sequence
  Synthetic
TTVTVGNVTYHFDNPEKADRFAKELAKKLNLEMQYHGDQIHVQ

SEQ ID NO: 2010 - protein, 40 aa, Artificial Sequence
  Synthetic
GVTYEFDGEEKARAKYKELADRNLDVKIEQRGNRWVLTAE

SEQ ID NO: 2011 - protein, 43 aa, Artificial Sequence
  Synthetic
STVHVNGQEYTLPFSPEYAAKWAKKAWPGAKVTVKNGKVTVHE

SEQ ID NO: 2012 - protein, 43 aa, Artificial Sequence
  Synthetic
TEDVERLVKEVRRKGLSDEQVEKDLRRQGVDERIVEKVVRLVK

SEQ ID NO: 2013 - protein, 43 aa, Artificial Sequence
  Synthetic
RSEEYEERAKEALKNGDEDTAKELLQRAGYSPEEAERVARKIM

SEQ ID NO: 2014 - protein, 43 aa, Artificial Sequence
  Synthetic
TTVHMGNITYHFDEPEQAKKFVRKMAEELNLEVHVKDGQYRVE

SEQ ID NO: 2015 - protein, 43 aa, Artificial Sequence
  Synthetic
NKKQELAKKALKKANGNKDKAREILKNLGFSEEEAERLIQKAD

SEQ ID NO: 2016 - protein, 43 aa, Artificial Sequence
  Synthetic
RPEAEEIARKLLEQGVSPDQIREILRQAGVSEEEIDKALKKAV

SEQ ID NO: 2017 - protein, 40 aa, Artificial Sequence
  Synthetic
RITITLTGPEQAKRLAEELARQNLKFEVHVDGDEIIIHIE

SEQ ID NO: 2018 - protein, 40 aa, Artificial Sequence
  Synthetic
QVTMEVHGEEQLRKALDKMRKMNLKVEVEEHNGKYILHAE

SEQ ID NO: 2019 - protein, 40 aa, Artificial Sequence
  Synthetic
ERTETYDDEEQARRAEEEARRKGKEVEVRRENDRWKVRIK

SEQ ID NO: 2020 - protein, 43 aa, Artificial Sequence
  Synthetic
DEELKRIVEDLLRRGVDDRQIQRYVKKRGFNPEQVKEVIKRVK

SEQ ID NO: 2021 - protein, 43 aa, Artificial Sequence
  Synthetic
DVEELIRRLEEVEKRGETVHIGNKTIHSPEQVRTLIKELRKKL

SEQ ID NO: 2022 - protein, 40 aa, Artificial Sequence
  Synthetic
TYTYKLTDEEASRRAEDEWRNRGYDVRVRNNNGTWEVEVR

SEQ ID NO: 2023 - protein, 43 aa, Artificial Sequence
  Synthetic
SEEVEKDVRELLKHGISPEQIRQALERKGVDPREVEKIVRKVV

SEQ ID NO: 2024 - protein, 43 aa, Artificial Sequence
  Synthetic
QTVHVGNVTYHFNNPEEAKKFAEKVAKTYNLRIEVHNGEIHIE

SEQ ID NO: 2025 - protein, 43 aa, Artificial Sequence
  Synthetic
ATVHVGNVTYHFSSPEQALKFALEVVKKSGAQMHIHGEEIKIE

SEQ ID NO: 2026 - protein, 43 aa, Artificial Sequence
  Synthetic
KRVQVNGVTYEFNNPEEVEKFVKEMVKKLQLEVQLHNGTYHIE

SEQ ID NO: 2027 - protein, 40 aa, Artificial Sequence
  Synthetic
SQTIEVSGEEAIKRAIKWAKAHNLTAKVEVHNGKWIVKAE

SEQ ID NO: 2028 - protein, 43 aa, Artificial Sequence
  Synthetic
DKEDLKKQVEEAIKRGDEERVKELLRRQGVDPKQVERIVKRLS

SEQ ID NO: 2029 - protein, 43 aa, Artificial Sequence
  Synthetic
DEKVKKLVEEVRRRNLDQEQIEKLLKEQGVSDEEIKQVLRLVS

SEQ ID NO: 2030 - protein, 43 aa, Artificial Sequence
  Synthetic
GEVHVNGTTYTFPTPELAKKFAQKAAKKYNLKVVVRGKTVKLK

SEQ ID NO: 2031 - protein, 43 aa, Artificial Sequence
  Synthetic
ADEVRKIIEDLRRRGVSEEQIERILQRQGFSDEEIKEAKKLVS

SEQ ID NO: 2032 - protein, 43 aa, Artificial Sequence
  Synthetic
LEEVKRILKELQDRGVSDEEVRKILKRNGIDPRQIEQAERELK

SEQ ID NO: 2033 - protein, 43 aa, Artificial Sequence
  Synthetic
GKVHIGNTTYEFPTPELAYKFAAQYAKEKGLEVTVKNGTVKVK

SEQ ID NO: 2034 - protein, 43 aa, Artificial Sequence
  Synthetic
GTVFIGDEQYTFDNPEEAIKWAEKYAKKAGLKVTVKNGKVHVK

SEQ ID NO: 2035 - protein, 43 aa, Artificial Sequence
  Synthetic
SQVIVGDTTFTFPTPEAAQKWAEKLAEKLNLELKVKNGQFKLH

SEQ ID NO: 2036 - protein, 43 aa, Artificial Sequence
  Synthetic
TTVQMGNLEWHFSSPEQAKEFAKKLAKKNNLEVQIHGDTMHVE

SEQ ID NO: 2037 - protein, 40 aa, Artificial Sequence
  Synthetic
AINITVPGEEAAKRLAKIWKEQNYEAHVETHNGRYIVQVH

SEQ ID NO: 2038 - protein, 43 aa, Artificial Sequence
  Synthetic
KEEAKRKVKELQKQGISDDEIIRRAQREGDEDLVRAVRHLKRL

SEQ ID NO: 2039 - protein, 43 aa, Artificial Sequence
  Synthetic
DEKDKRIEKIARELGVDKDIVRRALDEANGDEEKVRKIVKRIL

SEQ ID NO: 2040 - protein, 43 aa, Artificial Sequence
  Synthetic
SPSLREIAKKLYSNGVSPEEIQRILQKLGASPEEARRIFEEAV

SEQ ID NO: 2041 - protein, 43 aa, Artificial Sequence
  Synthetic
DEKEEILKRIAKLLNVDDRQVRKIVKDQNLDVEELYRKVERDS

SEQ ID NO: 2042 - protein, 43 aa, Artificial Sequence
  Synthetic
PEEIERLAEELIRRGYSREEIAELAKRLGYNEDEARRAVDEIL

SEQ ID NO: 2043 - protein, 43 aa, Artificial Sequence
  Synthetic
TTLEFNGKTLTFPSIEEAQKAAKKIAKKYQLKVETHGNTVKLH

SEQ ID NO: 2044 - protein, 43 aa, Artificial Sequence
  Synthetic
SEEKLIEELVKAVRNGDKEKVDKLARRLNRSKDEVKEAFERIF

SEQ ID NO: 2045 - protein, 43 aa, Artificial Sequence
  Synthetic
GTVHVGNHTYHFPSPEAAQKFAEKIAKKLNLTVKVDGDTIKVE

SEQ ID NO: 2046 - protein, 43 aa, Artificial Sequence
  Synthetic
TELEQRAKELAKELNISTEEAKRALDKANGNEDKAREIVKRLL

SEQ ID NO: 2047 - protein, 43 aa, Artificial Sequence
  Synthetic
TWVIVNGQKFQASSPEEAKKIAEKWAKILNVPVTKTGNYFKVT

SEQ ID NO: 2048 - protein, 43 aa, Artificial Sequence
  Synthetic
IEEVQKIVKELYKRGVSEEEIKKALKQRGVDDRQVEKAVRDVS

SEQ ID NO: 2049 - protein, 40 aa, Artificial Sequence
  Synthetic
QETYTFDGEEQAAEFNKELKKRNLPFEVRVENGKFIVTVD

SEQ ID NO: 2050 - protein, 40 aa, Artificial Sequence
  Synthetic
KVTVETHGEEQAKKMAKVLKAQNLEVKIEVRNGKYILHAE

SEQ ID NO: 2051 - protein, 40 aa, Artificial Sequence
  Synthetic
TQRLTFTTEEKARRAREELARRGRDVRLEQENGTWFVEFD

SEQ ID NO: 2052 - protein, 43 aa, Artificial Sequence
  Synthetic
ITIHVDGVTYHFSNPEEAKKFARKLAEEQNRTFEMKDGTIHVE

SEQ ID NO: 2053 - protein, 43 aa, Artificial Sequence
  Synthetic
EPRELKEEAEKALRNGNRDKARELLRKIGLSPEQAEQILQKLE

SEQ ID NO: 2054 - protein, 43 aa, Artificial Sequence
  Synthetic
DPREWARQVYRARQNGDEKRVKDIAKRLNLSDEQLDRLIKRVL

SEQ ID NO: 2055 - protein, 43 aa, Artificial Sequence
  Synthetic
SDDDKEKLKKAAKNGVSPEELKKIAKKLGLNPEWAERLYKKIF

SEQ ID NO: 2056 - protein, 43 aa, Artificial Sequence
  Synthetic
TQVHVGDVTFTASSPEEAQKLAEWAAKLFNVKVELHNGKVTVH

SEQ ID NO: 2057 - protein, 43 aa, Artificial Sequence
  Synthetic
TTVDLNGLEYHFSNPEEAQKFAEQMAKELGGELRFKDNKFKVE

SEQ ID NO: 2058 - protein, 40 aa, Artificial Sequence
  Synthetic
RETIEVNGEEQLKRLAEWAKKQNLEFKIEHHGNQIILHID

SEQ ID NO: 2059 - protein, 43 aa, Artificial Sequence
  Synthetic
PQEEWKKKAEKAARNGDKDTAEKLLRKAGVSDQEAKEFLNKIG

SEQ ID NO: 2060 - protein, 43 aa, Artificial Sequence
  Synthetic
NQVHIGNVTYDFDNPQKAKEFAEKMAKKLGLRVELHNGQIHVE

SEQ ID NO: 2061 - protein, 43 aa, Artificial Sequence
  Synthetic
HTVDVQGVTYHFDNPEEARKFAEEMAKRLGLQVHVKDGRYKVE

SEQ ID NO: 2062 - protein, 40 aa, Artificial Sequence
  Synthetic
SLTYTVHGEEQLKKIIEMLRRRNLDVKVEVHNGQWIVHAD

SEQ ID NO: 2063 - protein, 43 aa, Artificial Sequence
  Synthetic
MTVHVNGVQYDFDNPEEAKKFAEKVAKTYNLELRIKDGTIKIE

SEQ ID NO: 2064 - protein, 43 aa, Artificial Sequence
  Synthetic
QTVDVNGVKYDFSNPEEAKKFAEEMAKRLNGTVEMHGDRFHVK

SEQ ID NO: 2065 - protein, 43 aa, Artificial Sequence
  Synthetic
SDKAKEIFKKLIKNGLSEDQAEEVARRLGLDEKAIKLAKKELR

SEQ ID NO: 2066 - protein, 43 aa, Artificial Sequence
  Synthetic
KTVEVNGVKYDFDNPEEAKKFVERLAKELQLTVEWHGDRIRIE

SEQ ID NO: 2067 - protein, 40 aa, Artificial Sequence
  Synthetic
EVTFHMDGEEQAKKVLKWAKKANLDVKIRIENGQFVLHAS

SEQ ID NO: 2068 - protein, 43 aa, Artificial Sequence
  Synthetic
PPEEAKKKAEEAVKNNNPEKAQKILESAGVNPEEARQIVEKLR

SEQ ID NO: 2069 - protein, 43 aa, Artificial Sequence
  Synthetic
NEVHMGNITWHFSNPEEAKKFADELAKRKGLTYRMKDGKLEVE

SEQ ID NO: 2070 - protein, 43 aa, Artificial Sequence
  Synthetic
MTVHVNGVTYHFDNPQQVEEFAKKIAKKNNLRVEFHGNTVRVE

SEQ ID NO: 2071 - protein, 43 aa, Artificial Sequence
  Synthetic
TEREKRIAKKLAKKGLSPEQIRRYLEKQGYSTDEAEKIARLAM

SEQ ID NO: 2072 - protein, 43 aa, Artificial Sequence
  Synthetic
ATVEVNGVKYDFPSPEEARKFAEKVAKSLGLEVRLKDGTFHVE

SEQ ID NO: 2073 - protein, 43 aa, Artificial Sequence
  Synthetic
TTVHVNGLTYHFSTLEEAKRFALEVAKKSGLQVEFHGNEIHIE

SEQ ID NO: 2074 - protein, 43 aa, Artificial Sequence
  Synthetic
ATVHVGNVTYHFERLEEAKRFAEKIAKELGLQIQFHGQTIRVE

SEQ ID NO: 2075 - protein, 40 aa, Artificial Sequence
  Synthetic
HYEYHVEGEEQAKHVEKILRDQNLEVHVRVENGKYIIHAD

SEQ ID NO: 2076 - protein, 40 aa, Artificial Sequence
  Synthetic
RETYRFQGEKQAVDFMKKMRKQNLRVKVEEHNGQYEVTVD

SEQ ID NO: 2077 - protein, 43 aa, Artificial Sequence
  Synthetic
TEVHMGNVTYKFDNPEQAKKWAKEMAKQHNLQVHIHGDRVEVE

SEQ ID NO: 2078 - protein, 40 aa, Artificial Sequence
  Synthetic
EVTYTFQGEEAAKKFAKEMKKRNLEVHLEVHGDKVVVTVR

SEQ ID NO: 2079 - protein, 43 aa, Artificial Sequence
  Synthetic
KTVDVNGEEYHFPDPTEVEKFVKTLAKRLNLRVEHHGDTIKIS

SEQ ID NO: 2080 - protein, 40 aa, Artificial Sequence
  Synthetic
SITIETHGPEQMKKAKKYLEAMNLEVHVEVRGDKYILHAD

SEQ ID NO: 2081 - protein, 40 aa, Artificial Sequence
  Synthetic
SYRWEVHGEEQLRYAIKLAKDMNLQVEVQVHNGKIIVQAD

SEQ ID NO: 2082 - protein, 43 aa, Artificial Sequence
  Synthetic
TTVHVNGVQYDFNAPEEAKRFALRVAKENNLRIEFHGDTIRVE

SEQ ID NO: 2083 - protein, 43 aa, Artificial Sequence
  Synthetic
DDEDAKRKARRAQENNNEEELKKIAKEYNLTDDDLKKLIKDWG

SEQ ID NO: 2084 - protein, 43 aa, Artificial Sequence
  Synthetic
HTIEVQGMEYHFSNPEDAERFARQMAKELNLRLELHNGKWRVE

SEQ ID NO: 2085 - protein, 43 aa, Artificial Sequence
  Synthetic
TKKELLKEAWKALQSGNPEKARELAERAGYTTDYAEEFWRRQF

SEQ ID NO: 2086 - protein, 43 aa, Artificial Sequence
  Synthetic
REDDYKKKAKEALKNGDTEKARQLLEKAGYSPDEARKIIEDFL

SEQ ID NO: 2087 - protein, 40 aa, Artificial Sequence
  Synthetic
RITITMHGEEAAKALEKKLKAQNLKVEVRKDGDEVIFHIE

SEQ ID NO: 2088 - protein, 40 aa, Artificial Sequence
  Synthetic
QIDIHVHGEELARKIAKEMKKRNLNVEVHRHGDEWVITIK

SEQ ID NO: 2089 - protein, 43 aa, Artificial Sequence
  Synthetic
TKVHVNGTTYKFPSPDEARKFAQKVAKKANVTVEEKNGTFHVG

SEQ ID NO: 2090 - protein, 40 aa, Artificial Sequence
  Synthetic
RYRIEVHGEEQAKKVWKMLVDRNLDAKIEVHGDKIVVTAD

SEQ ID NO: 2091 - protein, 43 aa, Artificial Sequence
  Synthetic
TTIDLNGQTLHVPNPEKAKKLAKKLAKKYNLTVHVHGDTITVK

SEQ ID NO: 2092 - protein, 40 aa, Artificial Sequence
  Synthetic
EIKIRVEGEEAARKLMKELKKQNLEVEIEVHGDEYVVTIK

SEQ ID NO: 2093 - protein, 43 aa, Artificial Sequence
  Synthetic
SREDAKKEFVRLYEEGNEDEAKRVAREAGLSDDEAQKAYKEWK

SEQ ID NO: 2094 - protein, 43 aa, Artificial Sequence
  Synthetic
SEDLRKLVEELLNKNVTPEKIKKIAKKNGYDPTEAEEIIRRWI

SEQ ID NO: 2095 - protein, 43 aa, Artificial Sequence
  Synthetic
AEDYEKRIEKLQRNGIDEEQIKKILQDQGVSDEQVEKLIRRVK

SEQ ID NO: 2096 - protein, 43 aa, Artificial Sequence
  Synthetic
QDEVSKRVEKLVRNGVDPRQVRDHAKKLGLDPKLVDEIIKRVS

SEQ ID NO: 2097 - protein, 43 aa, Artificial Sequence
  Synthetic
RTEELEKRAKEAFKSGNEEKAEELLRRAGVSEDEAKRILKELR

SEQ ID NO: 2098 - protein, 43 aa, Artificial Sequence
  Synthetic
SEEVEKIFRELKRRGVSKEEVKEILRRQGVSEEEVQEAEKLVG

SEQ ID NO: 2099 - protein, 43 aa, Artificial Sequence
  Synthetic
DEEVQKEVKRLLDNGVSPDQVRDILRKKGVDKRQVDKVLREIG

SEQ ID NO: 2100 - protein, 43 aa, Artificial Sequence
  Synthetic
QTIHVNGKKYTWDNPEKAKKWAKKLAKIYGVQVTVDGNTIKVT

SEQ ID NO: 2101 - protein, 43 aa, Artificial Sequence
  Synthetic
DEREKRVEEIARKLGVDPRLVEQARKRANGDWRQVEEILRKLA

SEQ ID NO: 2102 - protein, 43 aa, Artificial Sequence
  Synthetic
KTVDVGNVTYTFPNPEQAEKFARRIAKELNLRIEIHGDKIRVE

SEQ ID NO: 2103 - protein, 40 aa, Artificial Sequence
  Synthetic
SVQYTFDGQELAEKFWKEMVDRNLRAEIHVKNGKWVVEVK

SEQ ID NO: 2104 - protein, 40 aa, Artificial Sequence
  Synthetic
TQRYEVDDKELAKEVAERARQNGLRVRLTQENGKWFVEVD

SEQ ID NO: 2105 - protein, 43 aa, Artificial Sequence
  Synthetic
PEDLKEKAERLKRKGVTPDEIKKELEKAGLSTDQAEQIWREVG

SEQ ID NO: 2106 - protein, 40 aa, Artificial Sequence
  Synthetic
SITFHTHGEEQMKKVAEMLKRRNLEVKIEIRGNEFIITAD

SEQ ID NO: 2107 - protein, 43 aa, Artificial Sequence
  Synthetic
KEEVKKIVDRLKKNGYNDEQIKEVLKRRGVDPRVVEDVVKRVS

SEQ ID NO: 2108 - protein, 43 aa, Artificial Sequence
  Synthetic
KEKEKKIKKLAKQIGVSDDIVREALDRANGDEEKVKDIVRKLL

SEQ ID NO: 2109 - protein, 40 aa, Artificial Sequence
  Synthetic
EIELTFEGEEQAKAAAEMAKKRNLKFEIRVENNRYIVHLK

SEQ ID NO: 2110 - protein, 43 aa, Artificial Sequence
  Synthetic
YQVDVDGLTFKFDNPEQMKKFLAELAKKKGLEYRLHNGTVKVE

SEQ ID NO: 2111 - protein, 40 aa, Artificial Sequence
  Synthetic
TLTYTFDSETEARKAEEKARRNGKDVRVTKSGGKWTVEIR

SEQ ID NO: 2112 - protein, 43 aa, Artificial Sequence
  Synthetic
QPEAKEYAREAYENGVTPQQIIEELQKLGLSPDQAREAYKYAT

SEQ ID NO: 2113 - protein, 40 aa, Artificial Sequence
  Synthetic
QVTIRVEGDEALKWAIEYLARQNLEFQVHQHGDQYILHAS

SEQ ID NO: 2114 - protein, 43 aa, Artificial Sequence
  Synthetic
PEELKKLVKELKKNGVSPEQVKEILKRNGVDPRQVDRVVKEVG

SEQ ID NO: 2115 - protein, 40 aa, Artificial Sequence
  Synthetic
TLDYTFTDEREARKAEKEARKNGKTVTVTQENGTWRVEIR

SEQ ID NO: 2116 - protein, 43 aa, Artificial Sequence
  Synthetic
DEEVRKQIERLLRNGVDDRQIKEILKRQGVDEKEVEQVIKEIK

SEQ ID NO: 2117 - protein, 40 aa, Artificial Sequence
  Synthetic
SETRTVHGEEQMKRELEWAKKANLKAEVEIRGNRIIIHFK

SEQ ID NO: 2118 - protein, 43 aa, Artificial Sequence
  Synthetic
KQVHLGNVTWQFDKPEQAEKFAKELAKKVNGTVEFHGDEIRVE

SEQ ID NO: 2119 - protein, 43 aa, Artificial Sequence
  Synthetic
RREEFKQRAEEAARQGNEDKARQILKDAGFSDEEIKQILKEAT

SEQ ID NO: 2120 - protein, 43 aa, Artificial Sequence
  Synthetic
ITVHVDGLTYHFNNPEEVKKFIRELMETKGGQVKLDNGTYKIE

SEQ ID NO: 2121 - protein, 43 aa, Artificial Sequence
  Synthetic
MEVDVNGVTYRFENPEEAVKFAQKMAKSLGRTMEIHGNKIEIK

SEQ ID NO: 2122 - protein, 40 aa, Artificial Sequence
  Synthetic
SYEYHVEGDEAMEKVMKMLHNMNLDVKVRREGDRWVIHAE

SEQ ID NO: 2123 - protein, 43 aa, Artificial Sequence
  Synthetic
ATVHMGNVTYHFPSPEEAKKFAKEMAKKMNLQIHIHGEQIEIH

SEQ ID NO: 2124 - protein, 43 aa, Artificial Sequence
  Synthetic
DSRIEEHVRRLLENGVSDDEIKEILKRQGVDPRQVEHVIRKVK

SEQ ID NO: 2125 - protein, 40 aa, Artificial Sequence
  Synthetic
SETYTVEGEEQMRRIQKMLKKRNLTVKVEVKNGKIIIHAE

SEQ ID NO: 2126 - protein, 43 aa, Artificial Sequence
  Synthetic
KTVQFNGLQFDFDNPEEAYRFAVEVAQRLGGEVHVHGDTIKVE

SEQ ID NO: 2127 - protein, 43 aa, Artificial Sequence
  Synthetic
SPEELKEKAKEALKNNDPDKARELLQKAGVSDDEAERFIQEAR

SEQ ID NO: 2128 - protein, 40 aa, Artificial Sequence
  Synthetic
KITITTEGEEAARKIEKKLRAQNLEVTIHVHNGQWVLTAE

SEQ ID NO: 2129 - protein, 40 aa, Artificial Sequence
  Synthetic
TKEKTVTDENKARELAKRLRNKGLTVRVTKENGTYRIEFD

SEQ ID NO: 2130 - protein, 43 aa, Artificial Sequence
  Synthetic
ATVHVNGYTYHFSSLEQAKRFAKEMAEKLNLEVRLHGNTLKVE

SEQ ID NO: 2131 - protein, 43 aa, Artificial Sequence
  Synthetic
TTVTINGETYTFPNPEEAKKYAEKLAKELGLTVTKSGGNFKVT

SEQ ID NO: 2132 - protein, 43 aa, Artificial Sequence
  Synthetic
DEEVEKHVRELLERGVSDEEIIRTLKKQGIDEDQVRKVIEDIK

SEQ ID NO: 2133 - protein, 43 aa, Artificial Sequence
  Synthetic
SDEWLEKAKKKLKKGIKITINGWTVPPGDEDAAKKVAKWLAKY

SEQ ID NO: 2134 - protein, 43 aa, Artificial Sequence
  Synthetic
KTVHVGNTTYTYPNPQLAAKAAKKFAKKYNLTVRIHGNTVQVH

SEQ ID NO: 2135 - protein, 43 aa, Artificial Sequence
  Synthetic
SPSEEIKKLEEAARRGEPFTLRGVTVTTSEEAKRLAKKLRKEE

SEQ ID NO: 2136 - protein, 43 aa, Artificial Sequence
  Synthetic
WTVEVKGVQYEFKEPEQALKFAQKVAKESGAQYEVHGNKIEVD

SEQ ID NO: 2137 - protein, 43 aa, Artificial Sequence
  Synthetic
LTVHLNGLTYHFDEPEQAERFAKEMAKKLNGQLKVKDGTYKIE

SEQ ID NO: 2138 - protein, 40 aa, Artificial Sequence
  Synthetic
TTTIRVTDEENARRLAETLRRKGLDVQVREKNGTFEVEVR

SEQ ID NO: 2139 - protein, 40 aa, Artificial Sequence
  Synthetic
TETYTVTDEEAVRELERRARKEGKEFRVREDNGTYEVRID

SEQ ID NO: 2140 - protein, 43 aa, Artificial Sequence
  Synthetic
SKKEKLFKEALKKANGNEEKAKKILQKLGINPEEAERLRQRVS

SEQ ID NO: 2141 - protein, 43 aa, Artificial Sequence
  Synthetic
NPDELKERAREAYERGNEDKARELLKKAGASPDEATKFLQKVD

SEQ ID NO: 2142 - protein, 43 aa, Artificial Sequence
  Synthetic
DEKVERIVEDLLKRGVDERQIKELLKRQGVDEKQVEDVIKKVG

SEQ ID NO: 2143 - protein, 43 aa, Artificial Sequence
  Synthetic
TTVDVNGETYKFPTTEAAQKFAKKLAEKNNLTVTVRGNKVTLK

SEQ ID NO: 2144 - protein, 43 aa, Artificial Sequence
  Synthetic
DEEAKKLVEKLKKNGVDPRQIKEILKKLGLSDDEVDKVVREVV

SEQ ID NO: 2145 - protein, 40 aa, Artificial Sequence
  Synthetic
TTTYTYDDEKQAREAEEKYKKQGLPVTVKQKNGKFQVTVH

SEQ ID NO: 2146 - protein, 43 aa, Artificial Sequence
  Synthetic
PDEVRKIVEDLLKKGVDPRQVREILKRQGVSDEEVDDVIKKVS

SEQ ID NO: 2147 - protein, 43 aa, Artificial Sequence
  Synthetic
ATVHVGNTTYHFNNPEEADKFAKTVAKQLGLKLETHGNTWHIQ

SEQ ID NO: 2148 - protein, 40 aa, Artificial Sequence
  Synthetic
EIRIEVPGKEIADKIIRELKKNNLDVQIRVENGKYIIHAS

SEQ ID NO: 2149 - protein, 43 aa, Artificial Sequence
  Synthetic
SEREKIIKELKKRGVTEIRINNKYTYDIRDPEQAREAAELILK

SEQ ID NO: 2150 - protein, 43 aa, Artificial Sequence
  Synthetic
KTVHVQGVTVTFSSPEQAKEYAKELAKKLNLRVEFHGDTIRVE

SEQ ID NO: 2151 - protein, 43 aa, Artificial Sequence
  Synthetic
PEELKKQVKELAKNGVDKRQIKEILKRQGVSDEEIKEVLKAAG

SEQ ID NO: 2152 - protein, 43 aa, Artificial Sequence
  Synthetic
PEEVERIARKLKRNGVSPEEVEEIVRRQGLDEEQVKQVVRIVS

SEQ ID NO: 2153 - protein, 40 aa, Artificial Sequence
  Synthetic
RQQYHVEGEEQMKRLIKELKKQNLEVHWTVEGNRYIVTAE

SEQ ID NO: 2154 - protein, 43 aa, Artificial Sequence
  Synthetic
SRKLEEIARRLFKNGVSPDQIKEILEKLGASPKEAEELARAAE

SEQ ID NO: 2155 - protein, 43 aa, Artificial Sequence
  Synthetic
EEEVKKLVEEIRKRNLSEEEVRRDLKRKGVDPDQIEKVVRIVF

SEQ ID NO: 2156 - protein, 43 aa, Artificial Sequence
  Synthetic
RPELEEIAEKIQKKGLSPDQAREIAQRLGLSDDEAEELAQLVA

SEQ ID NO: 2157 - protein, 43 aa, Artificial Sequence
  Synthetic
KQVTLGNTTYTFPNPQAAIDFAKKVAKKFGAKVTVRGNKITVQ

SEQ ID NO: 2158 - protein, 43 aa, Artificial Sequence
  Synthetic
TTVHVGDTTYTLPLSPEQAAEWAKKKFPNAEVHSDGNEVTVHQ

SEQ ID NO: 2159 - protein, 40 aa, Artificial Sequence
  Synthetic
RVTYELHGEEQVKWMIEWAKKQNLEVEIQVHNGKWIAHVE

SEQ ID NO: 2160 - protein, 43 aa, Artificial Sequence
  Synthetic
DEDIERIIRELLENGVSDDQIREILQRRGVSQEEIEDVIRKVK

SEQ ID NO: 2161 - protein, 43 aa, Artificial Sequence
  Synthetic
SEEVEDTIRKLLENGVSDEEIKRILKKLGVDPDEVDKVIRKVK

SEQ ID NO: 2162 - protein, 43 aa, Artificial Sequence
  Synthetic
SEDEARKKAKEAVKKGDTELARQILENAGIDPEEARQFIEKVQ

SEQ ID NO: 2163 - protein, 43 aa, Artificial Sequence
  Synthetic
ATVHVQGVQYDFETPEKADKFAKEMAKKLGLEVRVKDGTWRVE

SEQ ID NO: 2164 - protein, 43 aa, Artificial Sequence
  Synthetic
VTVHVNGVQYHFPTPEEARKFAEEMAKKLGLEIRFHGDTIRVE

SEQ ID NO: 2165 - protein, 43 aa, Artificial Sequence
  Synthetic
GQVHVNGQTVNWPNPDLAQKFALKLAKELGLTFEVHNGEVHLK

SEQ ID NO: 2166 - protein, 43 aa, Artificial Sequence
  Synthetic
TEVIIGNRTYQFTNPELAQKAAEELAKKYNGTVEKHNGQFKVE

SEQ ID NO: 2167 - protein, 43 aa, Artificial Sequence
  Synthetic
RTVHIGNTTYHYPNPEEAAKVAKKLAKKYGLQVHIKGTEIHIT

SEQ ID NO: 2168 - protein, 43 aa, Artificial Sequence
  Synthetic
TTVIIGDETYTFDNTQKAIEWAKKAAEKLGLTVKVENNKVQVH

SEQ ID NO: 2169 - protein, 43 aa, Artificial Sequence
  Synthetic
EERIKKLIEELLRRGVSEDEVREIVRDKGADPREVEEVIKRLS

SEQ ID NO: 2170 - protein, 43 aa, Artificial Sequence
  Synthetic
TTVHVNGVQYHFDKPEQAKKFAEELAKKLQGEVHIKDGTIRVE

SEQ ID NO: 2171 - protein, 40 aa, Artificial Sequence
  Synthetic
TTTFTVTDEENARRFAEKLKKKGLTFREEKRNGEFRFEVR

SEQ ID NO: 2172 - protein, 43 aa, Artificial Sequence
  Synthetic
TTVQVGNYTYTADTPEAAKKLAKKLAKIFNATVEVHGDTIKLH

SEQ ID NO: 2173 - protein, 43 aa, Artificial Sequence
  Synthetic
SELAKKLLKEAQEKGQPVTINGVTINPNTPEAQELLKKLAKKK

SEQ ID NO: 2174 - protein, 40 aa, Artificial Sequence
  Synthetic
RITITVEGEEQARRVEKEMRKRNLRVKVETHNGQYHITAD

SEQ ID NO: 2175 - protein, 43 aa, Artificial Sequence
  Synthetic
PEDVKKLLEQLYRDGYSPDEAAKIAKKLGATPEEIERARKELW

SEQ ID NO: 2176 - protein, 43 aa, Artificial Sequence
  Synthetic
PEEVERIVKELLDQGIDPRQVAKILRDNGFDPRDVERAVRKVS

SEQ ID NO: 2177 - protein, 43 aa, Artificial Sequence
  Synthetic
KTVHINGVQYDFDTPEQAERFAKKVAKELGLTLQVHGDELHVE

SEQ ID NO: 2178 - protein, 43 aa, Artificial Sequence
  Synthetic
ATVHVGNVTYHFENPEKAKEFAKKVAEKKGLKLEVHNGEFRMH

SEQ ID NO: 2179 - protein, 40 aa, Artificial Sequence
  Synthetic
SVTYEFTGQELAIRFYELMQKRNYNAEIEIRGDKARVTVN

SEQ ID NO: 2180 - protein, 43 aa, Artificial Sequence
  Synthetic
DERLRRIVEELQKQGISDEEIKEILRRQGVDPRQVDKVIKEVS

SEQ ID NO: 2181 - protein, 43 aa, Artificial Sequence
  Synthetic
ATVDVNGITYHFDNPEQADKWAKELAKKLNLTIEYHGNKIRVE

SEQ ID NO: 2182 - protein, 43 aa, Artificial Sequence
  Synthetic
DPTSKKIEELLRKANGDISKAKELAKRTGNPELAKLVEKWAKG

SEQ ID NO: 2183 - protein, 43 aa, Artificial Sequence
  Synthetic
PEEVQRHAERLKRQGISPDQVVEILRRQGVDERDVRAVKKYLS

SEQ ID NO: 2184 - protein, 43 aa, Artificial Sequence
  Synthetic
IERAKEVVKEVQKKNLSSEQLKELLRRAGVDERQVEKWVRRVM

SEQ ID NO: 2185 - protein, 40 aa, Artificial Sequence
  Synthetic
TQEYETTNPDEAERLRKELENKGLKVRIETENGKFKVKST

SEQ ID NO: 2186 - protein, 43 aa, Artificial Sequence
  Synthetic
GEVHINGQTYHFPTLDKAIKFAQKVAKKLGLTVKVKGNTIKVE

SEQ ID NO: 2187 - protein, 43 aa, Artificial Sequence
  Synthetic
DEKVEKIIRELLRQGVDQEQVVQIVRKKGADEKDVRRIVKELG

SEQ ID NO: 2188 - protein, 43 aa, Artificial Sequence
  Synthetic
NPEEVKKKVEKAVRNNNKEKAVRLLQQLGITPEDARRIAEELV

SEQ ID NO: 2189 - protein, 43 aa, Artificial Sequence
  Synthetic
KTVHVDGVTYHFDNPEEAKKWAERLARERNRRVEIHGDTIHVE

SEQ ID NO: 2190 - protein, 43 aa, Artificial Sequence
  Synthetic
QTVHVGNVTYHFPNPEDAERFAKEMAKKHNATLEVHGNTFHVE

SEQ ID NO: 2191 - protein, 43 aa, Artificial Sequence
  Synthetic
TTVHVNGVTYHFDNPEDAKRFAEEMAKRLNMTVTVKGDTWEVE

SEQ ID NO: 2192 - protein, 43 aa, Artificial Sequence
  Synthetic
EEEVKKIVEEVRKKNLSPDQIKELVQRLGISDEQAEEIVRLVW

SEQ ID NO: 2193 - protein, 43 aa, Artificial Sequence
  Synthetic
DEDLEEDVKRLLDQGIDPEQIKEILRRKGVDERQVQDVVERVA

SEQ ID NO: 2194 - protein, 43 aa, Artificial Sequence
  Synthetic
RQEEAERRAEEALKEGNEKKARELLKQAGLSPQQVEEAIQKIK

SEQ ID NO: 2195 - protein, 43 aa, Artificial Sequence
  Synthetic
QTVHVENYTYHFNNPEQVKKFAKKVAKELGLRIEFHGDTVHIE

SEQ ID NO: 2196 - protein, 43 aa, Artificial Sequence
  Synthetic
MTVHINGVQYHFPNPEEAKKFAEEMAKKHNGQMRIKDGTIEVE

SEQ ID NO: 2197 - protein, 40 aa, Artificial Sequence
  Synthetic
TLEFTVTDETEARKAAEWAQRQGLTYQITQKNGTWHVHVD

SEQ ID NO: 2198 - protein, 43 aa, Artificial Sequence
  Synthetic
TDEVRKLIEELLRRGVDKEQVAEIVKRQGVDEEEIERILRQIG

SEQ ID NO: 2199 - protein, 43 aa, Artificial Sequence
  Synthetic
GTVHVGNETYHFDNPEEVKKFVETIAKQLNLRVEQHGNTWHVS

SEQ ID NO: 2200 - protein, 43 aa, Artificial Sequence
  Synthetic
TTVRLGNTEYTAPSTDAAQKLAEKLAKKYNLTVEVHGNYIRVE

SEQ ID NO: 2201 - protein, 40 aa, Artificial Sequence
  Synthetic
SYTWEVEGDEQLKWAQELAKAQNLEFRVEKHGDRYIITAE

SEQ ID NO: 2202 - protein, 43 aa, Artificial Sequence
  Synthetic
TTVTVNGYTYTANNPEKAKELAKKLAKKYNAKVTVRGNTIKVE

SEQ ID NO: 2203 - protein, 43 aa, Artificial Sequence
  Synthetic
ATVHVQGLTYHFENPEEAQKWAEKLAKELGLEVRYEGDTWHVE

SEQ ID NO: 2204 - protein, 43 aa, Artificial Sequence
  Synthetic
EEEAEKIIKRALENGISKDEARKLAKKLGLTPDKAERALQEFG

SEQ ID NO: 2205 - protein, 43 aa, Artificial Sequence
  Synthetic
RRELEELVRKLLENGVSDEQIKKIARKLGISDEEVERAQKNAK

SEQ ID NO: 2206 - protein, 43 aa, Artificial Sequence
  Synthetic
STVHVGNTTYTLPSADAALKFAQKIANKYGLTVELHNGTVEVH

SEQ ID NO: 2207 - protein, 43 aa, Artificial Sequence
  Synthetic
LTVQFNNYEYHFDNPEEAKKFAAKVAKSLGGEIHMKDGTLQIK

SEQ ID NO: 2208 - protein, 43 aa, Artificial Sequence
  Synthetic
AEVHVNGVTYKFNNPEEAYKFAVKVARSQNRTMEIHGEQIHVK

SEQ ID NO: 2209 - protein, 43 aa, Artificial Sequence
  Synthetic
KQVHVNGKTYTFPNPEAARKFAQEAAKKYNLTVHEKNGQFTVK

SEQ ID NO: 2210 - protein, 40 aa, Artificial Sequence
  Synthetic
EIEYTFDGQEQAEKFYKAVAAKNLEVEIEQRGDQWVVTVK

SEQ ID NO: 2211 - protein, 43 aa, Artificial Sequence
  Synthetic
DEHVRRIVDDLRKKGVSKDEIKEILKRQGISDDQIRDAERYLK

SEQ ID NO: 2212 - protein, 43 aa, Artificial Sequence
  Synthetic
DKEEAQREVKKVLKQGDEKRAKEILKKAGISPEEVEEIIRKLM

SEQ ID NO: 2213 - protein, 40 aa, Artificial Sequence
  Synthetic
EQTYTFDNSKQAKKFAKELKKKGIPFQLHQKNGKWQVTKQ

SEQ ID NO: 2214 - protein, 43 aa, Artificial Sequence
  Synthetic
TTIKLGDYTYHVDTPEKAKKLAKKLAKKYNAEVQVHGNTIEIH

SEQ ID NO: 2215 - protein, 43 aa, Artificial Sequence
  Synthetic
DDNEARKQAAQLLKEGNEEEVKKLAKKLGISPEQLKREAKKFE

SEQ ID NO: 2216 - protein, 43 aa, Artificial Sequence
  Synthetic
DVEELIRHVETLVKRGEPVTIDGQTVEDPEQAKEWIKKLRKKL

SEQ ID NO: 2217 - protein, 43 aa, Artificial Sequence
  Synthetic
HQVHVGNYTYHFPNPEEAVKFAEKIAKELGLQVEYHGETIRIE

SEQ ID NO: 2218 - protein, 40 aa, Artificial Sequence
  Synthetic
TKHFTFTDKEAAQKFAKKAQKQGLPVQLQEKNGQYTVKVN

SEQ ID NO: 2219 - protein, 43 aa, Artificial Sequence
  Synthetic
STVKVNGTTFQADSPEAAKKFAKEYAKKYNLTVHIHGTTVHVK

SEQ ID NO: 2220 - protein, 43 aa, Artificial Sequence
  Synthetic
EEELKREARELLRRGVSPEQIKEILKRNGVDDRQIKRVKEALD

SEQ ID NO: 2221 - protein, 43 aa, Artificial Sequence
  Synthetic
QTVVINGKTFKFPTPEAAKQFAEEAAKKYNLKLTQDGDTWHVE

SEQ ID NO: 2222 - protein, 43 aa, Artificial Sequence
  Synthetic
SPEVERIAKELAKKGFSPEQIKQFLEKQGITPKEAEEAARKAN

SEQ ID NO: 2223 - protein, 40 aa, Artificial Sequence
  Synthetic
TQTYKFTDEQAAKEFAEKAKKKGLDATVTKENGTWKVTVH

SEQ ID NO: 2224 - protein, 43 aa, Artificial Sequence
  Synthetic
SQDKVKLLEQAAKDNKPVTINGETYTPGSDDFKKALKKARKSA

SEQ ID NO: 2225 - protein, 43 aa, Artificial Sequence
  Synthetic
PQEEIEKEAKKAAKNGDSDKAREILERAGYSKDEAEQIIRDIT

SEQ ID NO: 2226 - protein, 43 aa, Artificial Sequence
  Synthetic
DQNARELARELWERGVNPNQIKKIAEKLGLNADEVEEVLRRLN

SEQ ID NO: 2227 - protein, 40 aa, Artificial Sequence
  Synthetic
EITMTVEGTEQAKRVEKELRDRNLEFEVQVHNGKYVFTIK

SEQ ID NO: 2228 - protein, 43 aa, Artificial Sequence
  Synthetic
SRDEAQEKAKRALQSGNEDKARKILKKAGYSEEQAERIIRKWG

SEQ ID NO: 2229 - protein, 43 aa, Artificial Sequence
  Synthetic
MTVQFNGVEVKFDNPEEAKKFAKEVAEKLNGQMELKDGTIQIK

SEQ ID NO: 2230 - protein, 43 aa, Artificial Sequence
  Synthetic
KTVKINGEEYTFPTEEEAEKFAKKLAEEYNLQFKKENGTIKVE

SEQ ID NO: 2231 - protein, 43 aa, Artificial Sequence
  Synthetic
PWQELAKKLKKLAQKGIKITIGNVTVTSEDAAKKAEEYLKKQA

SEQ ID NO: 2232 - protein, 43 aa, Artificial Sequence
  Synthetic
DEKQKDLKRLAEELGLSDEIVKEVRRRANGDLDKVKEILKKIS

SEQ ID NO: 2233 - protein, 43 aa, Artificial Sequence
  Synthetic
SDEAERVARELKKNGYSLEYIERALRKLGVNEEEIKEALKNAK

SEQ ID NO: 2234 - protein, 43 aa, Artificial Sequence
  Synthetic
EERVERIVKRLLDQGIDERQVKEILRKQGVDDRQVEEVLRKIS

SEQ ID NO: 2235 - protein, 43 aa, Artificial Sequence
  Synthetic
PEEVERIVEKLVKNGVDPRQIEEILRKRGVDEREIEEALRKAT

SEQ ID NO: 2236 - protein, 43 aa, Artificial Sequence
  Synthetic
SKEDLKKEAKKALEEGNEDKAREILERAGLSPDQADKFLNNLK

SEQ ID NO: 2237 - protein, 43 aa, Artificial Sequence
  Synthetic
DKVEELVKEALRRANGDKDKVLEILKKQGVSDEELDKVRKILS

SEQ ID NO: 2238 - protein, 43 aa, Artificial Sequence
  Synthetic
TWQDLVKIAEKALEKGEPITINGITVTTKEQAKQAIEYLKKAY

SEQ ID NO: 2239 - protein, 43 aa, Artificial Sequence
  Synthetic
AEEVEKIVKELKKNNVDERQIEEILRRNGVDPREVEKAIRKVS

SEQ ID NO: 2240 - protein, 43 aa, Artificial Sequence
  Synthetic
DERVEKVQREVKRKQLSKDQIEELLRRAGVDERKVREIVKRLL

SEQ ID NO: 2241 - protein, 40 aa, Artificial Sequence
  Synthetic
TTRLETKDKNEAKRIAEEWKKKGKTVRFTRDGNKWTVEVD

SEQ ID NO: 2242 - protein, 43 aa, Artificial Sequence
  Synthetic
TTVHVNGMEYHFENPEKADKFAKKMAKDLNMTIEVHGNTWRVE

SEQ ID NO: 2243 - protein, 43 aa, Artificial Sequence
  Synthetic
GTVHVGNTTYHFDNPEKAIKFAEKYAKKKNLTVHVHGTTVTIK

SEQ ID NO: 2244 - protein, 43 aa, Artificial Sequence
  Synthetic
TTVTVGNVTYHFDNPEKAKKFAEKVAKTYNLQLEVHGNRFHVE

SEQ ID NO: 2245 - protein, 43 aa, Artificial Sequence
  Synthetic
IKVEVNGVEYQFDNPEKAKKFAQEVAEKLNLTYHLENGTFKVT

SEQ ID NO: 2246 - protein, 43 aa, Artificial Sequence
  Synthetic
GTVHVNGKKFTFPTPEAAEKFARKIAKELGLQVKVHGDTIKVE

SEQ ID NO: 2247 - protein, 40 aa, Artificial Sequence
  Synthetic
KITITTEGEEAAKKIVDEAKKRNLKVELTVENGQWVVHVE

SEQ ID NO: 2248 - protein, 43 aa, Artificial Sequence
  Synthetic
TTVHVGNTTYHFDTPEEADKFAKKVAKSLGLSFEKHGNEWHVE

SEQ ID NO: 2249 - protein, 43 aa, Artificial Sequence
  Synthetic
TTVHVNGQTYHFNDPTEVKRFVKEVVSKLNVSFSTKDGTWHVS

SEQ ID NO: 2250 - protein, 40 aa, Artificial Sequence
  Synthetic
RITIHFDGEEQARRAVEHMRRQNLKVEIRVENGKWVVTAD

SEQ ID NO: 2251 - protein, 43 aa, Artificial Sequence
  Synthetic
DERVEEIADRLRKNGYSPEQVQEILRRQGVDPREVDKVVRKIK

SEQ ID NO: 2252 - protein, 43 aa, Artificial Sequence
  Synthetic
GTVEWNGYQMHFDNPEEAEKYAKQMAKELNGEVEMHGDTFHIK

SEQ ID NO: 2253 - protein, 43 aa, Artificial Sequence
  Synthetic
KQVHVGNVTYNFSAPEQAKEFAEKVAKSLGLRLEVHNGKWRIE

SEQ ID NO: 2254 - protein, 43 aa, Artificial Sequence
  Synthetic
DQKELKKEVEKARKNGDTEKVKKLLKRIGVSDEQIKDILKKVS

SEQ ID NO: 2255 - protein, 40 aa, Artificial Sequence
  Synthetic
EYEYTVHGEEIARRIEEEMRRRNLKVEIHVHNGQIIIHAK

SEQ ID NO: 2256 - protein, 40 aa, Artificial Sequence
  Synthetic
SIKIEVEGEEKARRLMKEARKRNLEVHVEVHNGRFVLKID

SEQ ID NO: 2257 - protein, 43 aa, Artificial Sequence
  Synthetic
GQVTVGDTTYHFDNPEEAEKWAQKAAKIYGLTVHKKNGTYELK

SEQ ID NO: 2258 - protein, 40 aa, Artificial Sequence
  Synthetic
TTEYEFTDEEEARRAAEEWQKRGYTVEVKRDGTTLRVRVE

SEQ ID NO: 2259 - protein, 40 aa, Artificial Sequence
  Synthetic
SIHITVHGEEQAKRVEKWAQNHNLSLEWERHGDQVHFQID

SEQ ID NO: 2260 - protein, 40 aa, Artificial Sequence
  Synthetic
DYHFEVKGQEKAKEVVKMLKARNLEVHYEIHGDKVIITAR

SEQ ID NO: 2261 - protein, 40 aa, Artificial Sequence
  Synthetic
TTTYHAPDKEAAEKIAKKLKKQGIPATVTQINGTWTVQSN

SEQ ID NO: 2262 - protein, 43 aa, Artificial Sequence
  Synthetic
GQVHLNNYTYHFEKPEEAKKFAEEMAKKLGLRVEMHNGQFHVE

SEQ ID NO: 2263 - protein, 43 aa, Artificial Sequence
  Synthetic
DDRLKDHARKLWESGVSSDQIREILKRLGVSDEEVERVVRQVV

SEQ ID NO: 2264 - protein, 43 aa, Artificial Sequence
  Synthetic
NEEAEKIVEKLLKNGVSDDEVKEILRRLGVDPKEVDEVVRRVK

SEQ ID NO: 2265 - protein, 43 aa, Artificial Sequence
  Synthetic
TTVHINGETYHFNDPQQVKEFVETLVKRLGLRLETHGDTIHVS

SEQ ID NO: 2266 - protein, 43 aa, Artificial Sequence
  Synthetic
KQVHMGNLTWDFSNPEEAVKFALKLAKSQGLTVEFHGDTIKVE

SEQ ID NO: 2267 - protein, 43 aa, Artificial Sequence
  Synthetic
KEEEIKKEVKKAVKNGDEDRVRDLLKKLGLSDEQVDRFKKRVG

SEQ ID NO: 2268 - protein, 40 aa, Artificial Sequence
  Synthetic
KITVTFDGEEKAERFYQAAIKNNYTAKLRVENNRWIVHLE

SEQ ID NO: 2269 - protein, 43 aa, Artificial Sequence
  Synthetic
SEVHVNGITFDAPSPEAAKKWAQYLADIYNLTVHVHGNHVKVK

SEQ ID NO: 2270 - protein, 43 aa, Artificial Sequence
  Synthetic
QEVHVNGVTYKFDKPEQAEKFARELAKKLNLRLEFHGDTLRVE

SEQ ID NO: 2271 - protein, 43 aa, Artificial Sequence
  Synthetic
PEKIERIVEKLLKDGYDDDQIRRILQKQGVSDEEVDRVIRKVK

SEQ ID NO: 2272 - protein, 40 aa, Artificial Sequence
  Synthetic
EVTIEVEGEEQMRRIEKLAKDQNLNVEIQKHGDRYVLTLR

SEQ ID NO: 2273 - protein, 40 aa, Artificial Sequence
  Synthetic
STRQEFTDRKNAEKAREEWERRGYDVTVTETNGTWHVEWD

SEQ ID NO: 2274 - protein, 43 aa, Artificial Sequence
  Synthetic
WQVHVDGVTYHFDNPEEVKKFAKRIAEEKQRTIEIHNGQLHIK

SEQ ID NO: 2275 - protein, 43 aa, Artificial Sequence
  Synthetic
TPEAEKIAEELLKRGVSPREIEEILQRNGVDPEEAKEAVKRAE

SEQ ID NO: 2276 - protein, 43 aa, Artificial Sequence
  Synthetic
YDEARKLAEEARKKNLSPEQVEKLARKLGLSDSEQEYAKKLVS

SEQ ID NO: 2277 - protein, 43 aa, Artificial Sequence
  Synthetic
STVQIGNTQFTTDNLDYAIKLAQKLAKKYGLTVRVHGHTITVK

SEQ ID NO: 2278 - protein, 43 aa, Artificial Sequence
  Synthetic
DEDVEDVVRKLAENGVSKEEIEKILKRQGVDPDIVKKVIEKVV

SEQ ID NO: 2279 - protein, 40 aa, Artificial Sequence
  Synthetic
KTTYTVHTEEKARQIAKKLREKGLPVTVEKHNGTWHVTQH

SEQ ID NO: 2280 - protein, 40 aa, Artificial Sequence
  Synthetic
DLTLTFDGKEAADRAVKHAKKQNLEVHVEKHNNQWIVHIR

SEQ ID NO: 2281 - protein, 43 aa, Artificial Sequence
  Synthetic
HKVIVNGETYTATTLKEAKEIAQKFAKIYNLKVVVDGHTVKLK

SEQ ID NO: 2282 - protein, 40 aa, Artificial Sequence
  Synthetic
TTQFTVHSPEQAEQWKEYAKQKGLEVHVQKKNGTWHVTIH

SEQ ID NO: 2283 - protein, 43 aa, Artificial Sequence
  Synthetic
NTLEVNGVQYHFPNPEEAAKFAKEMAKKLGLKVELHNGKWRVE

SEQ ID NO: 2284 - protein, 43 aa, Artificial Sequence
  Synthetic
KDIDVNNMTFRFDNPEEAEKFAKEMAKKLGLRVEFHGDKVEIK

SEQ ID NO: 2285 - protein, 40 aa, Artificial Sequence
  Synthetic
SVTLHVEGPELAKKLAEMWKKRNYEVHVEIHGDKAVIHAD

SEQ ID NO: 2286 - protein, 43 aa, Artificial Sequence
  Synthetic
GTVHVGNLTYQFPNPQEAIEYAKKLAKKLGLTLKVKGNTVKVK

SEQ ID NO: 2287 - protein, 43 aa, Artificial Sequence
  Synthetic
ATVDVGNVQYHFSNPEQAKKWAKEMAKKLGLTLEFHGEKIRVE

SEQ ID NO: 2288 - protein, 43 aa, Artificial Sequence
  Synthetic
TTLIENGKKLTFDTTDEAYKYALKLAKEYNLTVTIKNGNVTLK

SEQ ID NO: 2289 - protein, 43 aa, Artificial Sequence
  Synthetic
DEKAKRLLEKLKRDGVSPEQVEEELRKRGVDERQVQEIVRKLG

SEQ ID NO: 2290 - protein, 40 aa, Artificial Sequence
  Synthetic
KLTIETHGEEQVRKAMEYMRRMNLEVHVEKHGDKYVLTAE

SEQ ID NO: 2291 - protein, 40 aa, Artificial Sequence
  Synthetic
SLHLTFHGEEQARRAYKKARKQNLNVEVQKHGNEWVLKID

SEQ ID NO: 2292 - protein, 43 aa, Artificial Sequence
  Synthetic
ATVQVNGLEYHFPNPEEAKEFAEKLAKKLNLTVEFHGETIQIK

SEQ ID NO: 2293 - protein, 43 aa, Artificial Sequence
  Synthetic
MTVKFDNYEFHFDNPEEAKEFAAQVAKKLGLEVQLHNGTFHMT

SEQ ID NO: 2294 - protein, 43 aa, Artificial Sequence
  Synthetic
TEDEKAKERIAKTFGLNPDEAEELLRRANGDEDKARKLAQKLL

SEQ ID NO: 2295 - protein, 43 aa, Artificial Sequence
  Synthetic
TTIKVNGQEYTVPLSPEQAAKAAKKRWPDYEVQIHGNTVKVTR

SEQ ID NO: 2296 - protein, 43 aa, Artificial Sequence
  Synthetic
IDDAAKIIEELRRRGVDPRQVREILKRQGIDPEEVKKAERKLS

SEQ ID NO: 2297 - protein, 43 aa, Artificial Sequence
  Synthetic
LTVEFNGYQFHFDNPEEAKKFAAEVAKKLNLEVQIHGNTLHIE

SEQ ID NO: 2298 - protein, 43 aa, Artificial Sequence
  Synthetic
ATVHVDGIQYDFSSPEQAKEFAYKWAKKHNLTWEVHGETIHIK

SEQ ID NO: 2299 - protein, 43 aa, Artificial Sequence
  Synthetic
DDEVVKQLRELFNRGIKHVTVNGQTFDITSEEDLKKVLKTVKS

SEQ ID NO: 2300 - protein, 43 aa, Artificial Sequence
  Synthetic
PPELEKIAEELYRRGVSPDQIKEILERLGVNPDLAQEVVDRVV

SEQ ID NO: 2301 - protein, 43 aa, Artificial Sequence
  Synthetic
KEDDAKALWKALQNGKPITINGLTYKPDNPEAVQAIKEIYKKF

SEQ ID NO: 2302 - protein, 40 aa, Artificial Sequence
  Synthetic
TYTITVTDREEARRWEEYWKNLGQDVQVREDNGTFTVEVR

SEQ ID NO: 2303 - protein, 43 aa, Artificial Sequence
  Synthetic
LTVHVGNVTYHFDEPEQVKKFVDRVAKELNLDVTMKDGQWHVE

SEQ ID NO: 2304 - protein, 43 aa, Artificial Sequence
  Synthetic
DPKLEEIVKRLADKGKSKEEIKRILRKLGYSDEEAEKAINKAG

SEQ ID NO: 2305 - protein, 43 aa, Artificial Sequence
  Synthetic
SKESLKKALELIRRGKPVEINGQKYEGGSDDARKELEKLIKKA

SEQ ID NO: 2306 - protein, 40 aa, Artificial Sequence
  Synthetic
RTTVTLTDEREARRLKKEVESEGKTVRVTHSNGEWHVEIE

SEQ ID NO: 2307 - protein, 40 aa, Artificial Sequence
  Synthetic
QVHLTFDGEEQARKAAKELKKQNLEVHVEVHNGKWVVQAD

SEQ ID NO: 2308 - protein, 43 aa, Artificial Sequence
  Synthetic
SQVLVNGQTFQADTPEKAQKLAEKLAEKYNGTVTLKNGVFKVK

SEQ ID NO: 2309 - protein, 43 aa, Artificial Sequence
  Synthetic
TQVLVNGTKYTFPSEEAAKKAAQKFANKYNLTFTLKNGVFEIK

SEQ ID NO: 2310 - protein, 43 aa, Artificial Sequence
  Synthetic
DKKEAARAFWELEQSGNKEEAQKVADKVGLDPDQLQELWKKIF

SEQ ID NO: 2311 - protein, 40 aa, Artificial Sequence
  Synthetic
SVTYTFDGPEAAKAFLKEMRDRNLKAEVHIHGDKAVVTIE

SEQ ID NO: 2312 - protein, 43 aa, Artificial Sequence
  Synthetic
TKDDLLKRALEALRNNDREEVQKIAKEANVSEDELQEEVKKWE

SEQ ID NO: 2313 - protein, 43 aa, Artificial Sequence
  Synthetic
PKEEAAQRAYKALQNNDDDKVREIAKELGVTEEDLRRAVEEYW

SEQ ID NO: 2314 - protein, 43 aa, Artificial Sequence
  Synthetic
ATVHIQGVTYHFDNPEKAKEFAQKMAEKLGLEIRFHGDTIKVE

SEQ ID NO: 2315 - protein, 40 aa, Artificial Sequence
  Synthetic
KETYTTHGEEQAKKIAEMLKKKNLTVKIEIHGDQWIVHAE

SEQ ID NO: 2316 - protein, 43 aa, Artificial Sequence
  Synthetic
PEEDIKRKAKELLKEGNKEKAKRLLEKAGFSPDEAEQILNEIS

SEQ ID NO: 2317 - protein, 43 aa, Artificial Sequence
  Synthetic
TTVHVGNVTYHFDNPEQAVKFALEVAKKQQGTIRFEGDTIHVE

SEQ ID NO: 2318 - protein, 43 aa, Artificial Sequence
  Synthetic
LTIQFNGLEYHFENPEEAEKFAQKVAKDYQGQIHYKDGTYEIR

SEQ ID NO: 2319 - protein, 43 aa, Artificial Sequence
  Synthetic
APDWKKYALKLLKNGVTAVTINGITVKADNPEKLAQIVADIAA

SEQ ID NO: 2320 - protein, 43 aa, Artificial Sequence
  Synthetic
TTIEIGDLRYNIPNPKKAQELAKKLAKKLGLQVHIDGNTIRVT

SEQ ID NO: 2321 - protein, 43 aa, Artificial Sequence
  Synthetic
TTLHLGDETYTFPSPDAAYKYALQVAQEKGLDVTIENGTVKVR

SEQ ID NO: 2322 - protein, 43 aa, Artificial Sequence
  Synthetic
YTVHLNGLTYHFNSPEEALRFAEKMARTYNLKLEVHGNTLRVE

SEQ ID NO: 2323 - protein, 43 aa, Artificial Sequence
  Synthetic
IQVHINGYTYHFNNPEEALKFAAEVAKKLGLTMDIKDNQIHVE

SEQ ID NO: 2324 - protein, 40 aa, Artificial Sequence
  Synthetic
QMHWTVHGEEQAQKLAEELKRRNLEVHIEVHGNEIILTAN

SEQ ID NO: 2325 - protein, 43 aa, Artificial Sequence
  Synthetic
KRVEVNGVEFKFDNPEKAKKFAEEMARKLNRKLEVHGDTLKVE

SEQ ID NO: 2326 - protein, 40 aa, Artificial Sequence
  Synthetic
QWHYTVDGEEKARRVYKHLADMNLNVEVQVHNGKWIITAE

SEQ ID NO: 2327 - protein, 40 aa, Artificial Sequence
  Synthetic
SEQIHVEGEEALKEVLKKLKKRNLEVEVQVHNNRYVLHIH

SEQ ID NO: 2328 - protein, 43 aa, Artificial Sequence
  Synthetic
AEEVAKLFDRLKRNGLSRKQVKDVLRRQGVNDEQIKEAERIVG

SEQ ID NO: 2329 - protein, 43 aa, Artificial Sequence
  Synthetic
TTVHMGNLTFTFDTPEQAKEFAEKLAKKQNLEVRLHGDEFRIE

SEQ ID NO: 2330 - protein, 43 aa, Artificial Sequence
  Synthetic
IEEIKKRAEELYRRGQDPEKIRKILENLGLSSDEAKKALDNLS

SEQ ID NO: 2331 - protein, 43 aa, Artificial Sequence
  Synthetic
DDKDVKKRVQEILKQGNKEEAQEVLERAGFSPEQVERILQRLS

SEQ ID NO: 2332 - protein, 43 aa, Artificial Sequence
  Synthetic
KQVHVGNVTYHFDNPEQAEEFARKMAKKLNLKLEFHGDKIRVE

SEQ ID NO: 2333 - protein, 43 aa, Artificial Sequence
  Synthetic
SDKAKKLAEELKRNNVDKRQVEKILREQGVSDEEIKIVKRIID

SEQ ID NO: 2334 - protein, 40 aa, Artificial Sequence
  Synthetic
SITITVHGEEAQKKLEEKLKRENLEFQVHVHNGEIHVTFD

SEQ ID NO: 2335 - protein, 43 aa, Artificial Sequence
  Synthetic
QEEEKKVKKIAKKYGVSLEDVRRWAEKQGNEKLARIAERLIRE

SEQ ID NO: 2336 - protein, 40 aa, Artificial Sequence
  Synthetic
ELTVTWDGEELARKFIEEMKQRNLEVHIEVRNGKFIVTAS

SEQ ID NO: 2337 - protein, 43 aa, Artificial Sequence
  Synthetic
TTVDLNGLEYHFDNPEEAKKFAERVAKEQNLKMHVKDGTFKIE

SEQ ID NO: 2338 - protein, 43 aa, Artificial Sequence
  Synthetic
QTVHVGNVTYHFPNPEEAEKFVKRVAKENNLTVEFRGDTVHIE

SEQ ID NO: 2339 - protein, 43 aa, Artificial Sequence
  Synthetic
PDEDLKREALEALRQGDEERVQNIAKELNVDPEQLRQELNKLS

SEQ ID NO: 2340 - protein, 40 aa, Artificial Sequence
  Synthetic
SETYTFEGKEAADAFIKEMKKRNLEAHIEIRNGRYIVHVH

SEQ ID NO: 2341 - protein, 40 aa, Artificial Sequence
  Synthetic
SETYEVHGEEQAKKWIKIMKNRNYKVEIEIHNGKIILTAK

SEQ ID NO: 2342 - protein, 40 aa, Artificial Sequence
  Synthetic
TETYTYDDKKQAKEAAEKWKKNGKTVKIQQFGDKYKIHVK

SEQ ID NO: 2343 - protein, 43 aa, Artificial Sequence
  Synthetic
PDDEAKKKVEEAIKNGDEDKAKEIAKRANLSDEEWKRLKKKVG

SEQ ID NO: 2344 - protein, 43 aa, Artificial Sequence
  Synthetic
TEEVKELLKEIQSKNIKTVTINGYTVTSDDPNEIVKFVREVLS

SEQ ID NO: 2345 - protein, 40 aa, Artificial Sequence
  Synthetic
TTTLTFTNPEQAERAKEKLKRKGIPFEVRTDGTTVTVRVE

SEQ ID NO: 2346 - protein, 40 aa, Artificial Sequence
  Synthetic
TYTYTTTDETEARKWEEWAKKQGLTVTIRQSNGTWEVRVD

SEQ ID NO: 2347 - protein, 43 aa, Artificial Sequence
  Synthetic
DTVIVGTQTYTYPNPEEAEKAAKYFAKKYNLTLENHNGEFRVQ

SEQ ID NO: 2348 - protein, 40 aa, Artificial Sequence
  Synthetic
TQETTVTDKEEARRIKEEAEKKGITVTVTNDNGTWKVRWD

SEQ ID NO: 2349 - protein, 43 aa, Artificial Sequence
  Synthetic
TTVHLGNTTYTTDNTKKAQELAKKLAKKYNLTVTIDGDEIRIK

SEQ ID NO: 2350 - protein, 43 aa, Artificial Sequence
  Synthetic
QTVTMNGINYDFDNPEEAVKFALRLAKEQNLRVEFHGDHIRIE

SEQ ID NO: 2351 - protein, 40 aa, Artificial Sequence
  Synthetic
EVTYTFQGEEQARRFAEKMKKHNLRVELHQHGDKYVVTIK

SEQ ID NO: 2352 - protein, 43 aa, Artificial Sequence
  Synthetic
TEVHVNGIEIHTDNPEAAIKIAQKLAKKYQLPVEIHGNTVKVK

SEQ ID NO: 2353 - protein, 43 aa, Artificial Sequence
  Synthetic
DEDEVKDKVKKVLKNGDKERAKKILQKAGIDDREVEKILQRLL

SEQ ID NO: 2354 - protein, 43 aa, Artificial Sequence
  Synthetic
RTEDAQKKAKELLRRGNEEEAERLLKEAGVSPDEIQKIKDELG

SEQ ID NO: 2355 - protein, 43 aa, Artificial Sequence
  Synthetic
KTLTVNGEKYQYDNPEAAKKAAKKLAKKFNATVEIHGDTITVK

SEQ ID NO: 2356 - protein, 43 aa, Artificial Sequence
  Synthetic
GTVVVGNTKIKFPNPEKAEQFAKEIAKKLNLTVHTDGNTFTVK

SEQ ID NO: 2357 - protein, 43 aa, Artificial Sequence
  Synthetic
NDEVKKIVEKLYRSGVSPEEIKEILKRNNVDPREVDKAVKEAI

SEQ ID NO: 2358 - protein, 43 aa, Artificial Sequence
  Synthetic
MTVQFNNYEYHFDNPEEAAKFAQKVAEKLGLKVELHNGTFKVE

SEQ ID NO: 2359 - protein, 43 aa, Artificial Sequence
  Synthetic
DDDKVERDVREALERGDEERVDKLVKRLNVSEEILKKLRREIF

SEQ ID NO: 2360 - protein, 43 aa, Artificial Sequence
  Synthetic
DERVEEVVRKLLENGVSPDQVKEIAKKLGIDPREVDKVIKDVL

SEQ ID NO: 2361 - protein, 43 aa, Artificial Sequence
  Synthetic
PKEELKKEAEKLAKNGNKEEASKLLKKAGLSDEDIKKFLKEAE

SEQ ID NO: 2362 - protein, 43 aa, Artificial Sequence
  Synthetic
DKKKDVLRRIAELLGVDERQVEKILKDRNLSPDDLLEEVQKKY

SEQ ID NO: 2363 - protein, 43 aa, Artificial Sequence
  Synthetic
YTVHVGNLTYHFDTLEQAERFAKEMAKKLNLEVQVHNGEFHIE

SEQ ID NO: 2364 - protein, 41 aa, Artificial Sequence
  Synthetic
TTLHVGNTTYTFPSWKAAVKFAQKLGVKEIHVDGNTVKVQK

SEQ ID NO: 2365 - protein, 40 aa, Artificial Sequence
  Synthetic
GIKYTFEGEEQAKRFMDEMKKRNLEFEVQVHNGRWIIQVD

SEQ ID NO: 2366 - protein, 43 aa, Artificial Sequence
  Synthetic
LTVDIQGIKYTFDNPEEVEKFAKEMAKKLNLEVRYKDGTWHVE

SEQ ID NO: 2367 - protein, 43 aa, Artificial Sequence
  Synthetic
TTVHLNGVTYTFPNPEEARKFVEKLAKTLNLKVEVHNGTYHIE

SEQ ID NO: 2368 - protein, 43 aa, Artificial Sequence
  Synthetic
DERLKDTVRKLLENGVSDEQVKEILKRLGVDDKQVEKVIRDVK

SEQ ID NO: 2369 - protein, 43 aa, Artificial Sequence
  Synthetic
AQVDVNGVTYTFNNPEEAKRFAKRVAKEKGLKIEFHGEQIRIE

SEQ ID NO: 2370 - protein, 43 aa, Artificial Sequence
  Synthetic
RTVQFDGYEYHFDNPEEALKFAAEVAKKLNGEMHIKDGTIHVK

SEQ ID NO: 2371 - protein, 43 aa, Artificial Sequence
  Synthetic
PQEELERRIQKAIKNGDEDTAKELAKRAGLSDDDWEQLRREAS

SEQ ID NO: 2372 - protein, 43 aa, Artificial Sequence
  Synthetic
AKVEVNGVEYTFSNPEEAEKFAKEVAKKLGLDVEIKNGTWHIE

SEQ ID NO: 2373 - protein, 43 aa, Artificial Sequence
  Synthetic
SQETKEAKRLAKELGISTDEAQRLLDEAGGDESKAKELWKREQ

SEQ ID NO: 2374 - protein, 43 aa, Artificial Sequence
  Synthetic
QTVEVNGLKIDFNNPEEALKYALKVAKSLGAEMHFKDGTYHIE

SEQ ID NO: 2375 - protein, 43 aa, Artificial Sequence
  Synthetic
GEVHVNGVTYKFENPEKAREFADRVAKKLGGTYEIHGSTVHVK

SEQ ID NO: 2376 - protein, 43 aa, Artificial Sequence
  Synthetic
ATVHVQGLTIHFSSLEEMVKYALKVAKELGLELRFHGNTVEVK

SEQ ID NO: 2377 - protein, 43 aa, Artificial Sequence
  Synthetic
TKVKYNGTTVKVDNPEKAKQLAKKVAKKYNLTVHVHGDTVKVE

SEQ ID NO: 2378 - protein, 43 aa, Artificial Sequence
  Synthetic
TTLKIGTQTWTFDSADLALKWAQKYAKKHGLTVRLTNGTVKVK

SEQ ID NO: 2379 - protein, 43 aa, Artificial Sequence
  Synthetic
ITVHINGVTYHFNNPEEVRQFVERMAKELGLQVEVRGNEVHVE

SEQ ID NO: 2380 - protein, 43 aa, Artificial Sequence
  Synthetic
LTVDVKGVEYTFPNPEEMVKFAQEVAKKLGGRVEYHGNRLEVK

SEQ ID NO: 2381 - protein, 43 aa, Artificial Sequence
  Synthetic
KTVHVNGVQVTFSSPEEAVKYALKVAKELNLKIEFHGDTIKVE

SEQ ID NO: 2382 - protein, 43 aa, Artificial Sequence
  Synthetic
PEEVKKVVKQLLDRNVSDEQIEEILKRQGVDPREVEEAIRDVK

SEQ ID NO: 2383 - protein, 43 aa, Artificial Sequence
  Synthetic
SAEEKAKELEERARRGEEIKVGTIRVTTEEELRRLLDWFRKQQ

SEQ ID NO: 2384 - protein, 43 aa, Artificial Sequence
  Synthetic
RPAEEAERALREGKTLRITVNGYTFEVHPGDQKAAELIKKVAG

SEQ ID NO: 2385 - protein, 43 aa, Artificial Sequence
  Synthetic
PEDQLREEARRAFEEGNKEEAERILRKIGLSDEEIKRALKKLK

SEQ ID NO: 2386 - protein, 43 aa, Artificial Sequence
  Synthetic
LKVTVQGVEYEFDEPEQAKKFAKKLAKSLGLTMQLHGDTIRVE

SEQ ID NO: 2387 - protein, 40 aa, Artificial Sequence
  Synthetic
QIDITVHGKEKADRIVKELKERNLDAQLKVENGRYVIHVQ

SEQ ID NO: 2388 - protein, 43 aa, Artificial Sequence
  Synthetic
AQVHVNGLTYHFDNPEEAKKFADEMARKLGREWHVKDGRFEVK

SEQ ID NO: 2389 - protein, 43 aa, Artificial Sequence
  Synthetic
KTVDVNGIKFTFENPEVVYKFVLELAQKLNLTIKMKDGRVEVE

SEQ ID NO: 2390 - protein, 43 aa, Artificial Sequence
  Synthetic
SQEDAKKKAEKALRNGNKDKARQILEDAGFSTDEAEKIIKKIL

SEQ ID NO: 2391 - protein, 43 aa, Artificial Sequence
  Synthetic
IQEEVKKEVKEVLKRGDEDRAEEILRRAGVSEEEIKRVKDEVL

SEQ ID NO: 2392 - protein, 43 aa, Artificial Sequence
  Synthetic
AKVTVNGVEYEFNNPEEAVKFAQEMAKKLGLQIEYHGETLRVE

SEQ ID NO: 2393 - protein, 43 aa, Artificial Sequence
  Synthetic
TTVEVKGVKYKFDNPEEAKKFVEKVAKSLGSRYTVRGDTWHVE

SEQ ID NO: 2394 - protein, 43 aa, Artificial Sequence
  Synthetic
ATVHVNGVTYHFENPEQAKKFVKEVVKKLGSTYEVHNGHFHVK

SEQ ID NO: 2395 - protein, 43 aa, Artificial Sequence
  Synthetic
TQDELEYIIEAAKRGVSEVHVNNQTYKFRSPDEARQWAEKQKN

SEQ ID NO: 2396 - protein, 43 aa, Artificial Sequence
  Synthetic
TTVKVGNITYTASTVEEAKEYAQKLAKKYNLTLEVHGNTVEVH

SEQ ID NO: 2397 - protein, 43 aa, Artificial Sequence
  Synthetic
KTIDLENYTMHFDNPEEAVKWALEMAKKLGLRVEFHGDKITVE

SEQ ID NO: 2398 - protein, 43 aa, Artificial Sequence
  Synthetic
TEEDLRRIAEELVKSGNKEKAKRFLEKAGVDPKKAEQIVQEAE

SEQ ID NO: 2399 - protein, 43 aa, Artificial Sequence
  Synthetic
DEEVEKIVRELKKNGVSKDEIREILQRNGISDDDIEEVLRKIK

SEQ ID NO: 2400 - protein, 43 aa, Artificial Sequence
  Synthetic
QELEERFRSALEAAGGDEDRAEEILKNRGITPEEIEKARRLYL

SEQ ID NO: 2401 - protein, 40 aa, Artificial Sequence
  Synthetic
EIHITVDGEEQARRVEERARRQNLEVHIKKENGKYIITIS

SEQ ID NO: 2402 - protein, 43 aa, Artificial Sequence
  Synthetic
PEELQRQVEKLLKNGVDDEQIKKILKDQGVDDEEVKRLIEKVK

SEQ ID NO: 2403 - protein, 43 aa, Artificial Sequence
  Synthetic
MEEAKKKAKELLKQGVDPRDVRRILKEAGVSDEEIKKVEREVS

SEQ ID NO: 2404 - protein, 40 aa, Artificial Sequence
  Synthetic
AITIQTEGEEAAKKIIEKARKANLQYEVEVRNGQFIITLK

SEQ ID NO: 2405 - protein, 43 aa, Artificial Sequence
  Synthetic
AEVHVKGVTYKFSSPEEAKKFAEKVARELGRRYEIHGDTIHVE

SEQ ID NO: 2406 - protein, 43 aa, Artificial Sequence
  Synthetic
LTVHINGVQYDFDTPEEAKKFAKEMAEKLGLQVHIHGNQIHVE

SEQ ID NO: 2407 - protein, 43 aa, Artificial Sequence
  Synthetic
NEEVEKIVEDLLRKGVSDEEIKRILERNGVDPDTVEKVIKKLK

SEQ ID NO: 2408 - protein, 43 aa, Artificial Sequence
  Synthetic
DDRVTEIVKELKKKGVSPDQVTEILRRQGVDERKVQEAVRRVM

SEQ ID NO: 2409 - protein, 43 aa, Artificial Sequence
  Synthetic
AEVDVQGVKYTFDNPEEAKKFAEKLAKELGGTVEIKNNKFHVE

SEQ ID NO: 2410 - protein, 43 aa, Artificial Sequence
  Synthetic
TTVIVGNTTYKYDTPEKATKAARKLAKKYNLQVHEDGNTIKVT

SEQ ID NO: 2411 - protein, 43 aa, Artificial Sequence
  Synthetic
PQEELKKRAKEAWERGNEDEARKALQKAGYSPDQADEILKRLD

SEQ ID NO: 2412 - protein, 43 aa, Artificial Sequence
  Synthetic
TEVNVGNTTFTASSPEEAKKIAQKWAKILGLTVHVDGTTVTLK

SEQ ID NO: 2413 - protein, 40 aa, Artificial Sequence
  Synthetic
GITYESHGPEDAKRVKEMLERRNLTVEIEVKNGKWIITAK

SEQ ID NO: 2414 - protein, 43 aa, Artificial Sequence
  Synthetic
GTVIVGNETYTFDNPEEAKKFAKQLAEELNLKLKTDGNKFTVT

SEQ ID NO: 2415 - protein, 43 aa, Artificial Sequence
  Synthetic
DEEKKKVEELIRRAGGDYDKARELAEREGSEEAKKIIDELKKR

SEQ ID NO: 2416 - protein, 43 aa, Artificial Sequence
  Synthetic
PEEEKKKAKQAWKDGASEEQVERILRKANVNPDEIEQIKKELR

SEQ ID NO: 2417 - protein, 43 aa, Artificial Sequence
  Synthetic
TTVEFNGQQYHFNNEEEVKKFVTEVARKLNLEVKEKDGTLRLE

SEQ ID NO: 2418 - protein, 43 aa, Artificial Sequence
  Synthetic
GKVHVNGTTYDFPTVEEAQKFAKKVAKSQNLTVEVSGNTVKVH

SEQ ID NO: 2419 - protein, 43 aa, Artificial Sequence
  Synthetic
DDEVRKEVEKLLRNGVDKDQIRERLEKQGVDPREIEEILRQLD

SEQ ID NO: 2420 - protein, 40 aa, Artificial Sequence
  Synthetic
RYTITVNGEEQMKEAIKYMKKMNLNVEARVENGQFIITAD

SEQ ID NO: 2421 - protein, 43 aa, Artificial Sequence
  Synthetic
KKVHVNGTTYTFDSPEDAYKFALEVAKKLNLTVTVKNGQVEVH

SEQ ID NO: 2422 - protein, 43 aa, Artificial Sequence
  Synthetic
HTLHVNGQTYTADNPEKLYKIALKIAKKLGLTVRVHGNTVKVE

SEQ ID NO: 2423 - protein, 40 aa, Artificial Sequence
  Synthetic
TQETEVTNPEAAQTVVEEWARRGYTVTVEERNGRFRVRWD

SEQ ID NO: 2424 - protein, 40 aa, Artificial Sequence
  Synthetic
EIQWRIEGPEKAKKLIEELRRRNLEVHAEIRGDEVIVHAR

SEQ ID NO: 2425 - protein, 43 aa, Artificial Sequence
  Synthetic
SDEAEKIARKLAKNGKSKEEIEKILRKLGVDESEIKQAQKNLG

SEQ ID NO: 2426 - protein, 40 aa, Artificial Sequence
  Synthetic
AITWQIQGEEKAKRLMKELRKQNLDVKIEQDGDQFVVTAS

SEQ ID NO: 2427 - protein, 43 aa, Artificial Sequence
  Synthetic
PEEVEKVIDELHRRGVSEEQIRKYLQRAGIDDRQIEEVRRKWS

SEQ ID NO: 2428 - protein, 43 aa, Artificial Sequence
  Synthetic
DDEELEKTLKELVRQGNEITFGDLRVTTEEEVKEVVKKLQERK

SEQ ID NO: 2429 - protein, 43 aa, Artificial Sequence
  Synthetic
ITVHLNGLTYHFPNPEEAKKFAEEMAKKLGLKIEFHGDEIHMK

SEQ ID NO: 2430 - protein, 43 aa, Artificial Sequence
  Synthetic
DDELKKHARELYKRGVDEKQIEKILRDNGVSDEQVKKVVEAVK

SEQ ID NO: 2431 - protein, 43 aa, Artificial Sequence
  Synthetic
DEKIKDIVEKLLRNGVSPDEITDILRKNGADPREVKKVIKEIS

SEQ ID NO: 2432 - protein, 43 aa, Artificial Sequence
  Synthetic
VTVHVNGVEYRFENPEKAKEFALKMAKSKGLKIEFHGNTIRVE

SEQ ID NO: 2433 - protein, 43 aa, Artificial Sequence
  Synthetic
TTVHIGNTTYHFNNTEEAAKYAKKVAKEKNLEVHVHGHTIKVK

SEQ ID NO: 2434 - protein, 43 aa, Artificial Sequence
  Synthetic
TLEELIKIAKELAKKGQQVNLGNYTFDNPEEAKRWAKEAEKNM

SEQ ID NO: 2435 - protein, 40 aa, Artificial Sequence
  Synthetic
ETELEYDDKTQAQKAIEEAKKKGITVELRKENGRWRVRFE

SEQ ID NO: 2436 - protein, 43 aa, Artificial Sequence
  Synthetic
DEKVEKIVKDLAKQGVDKEEIKEILKRQGVDDEEIKKAVRKVD

SEQ ID NO: 2437 - protein, 43 aa, Artificial Sequence
  Synthetic
TTVVYNGTQVEFPSQEAAEEYAKKVANKYGLTVTVENGTVKLR

SEQ ID NO: 2438 - protein, 43 aa, Artificial Sequence
  Synthetic
VTVDVKGVTYHFPNPEEAVKFAEKLAKELGATVEYHGNTIKVD

SEQ ID NO: 2439 - protein, 43 aa, Artificial Sequence
  Synthetic
AQVHVNGVTYTFDNPEQARKFAEEMAKKLNLQLHVKDGHFRIE

SEQ ID NO: 2440 - protein, 43 aa, Artificial Sequence
  Synthetic
DEDKALQKAREVLKRGDDEKLKEIARRLNIDERQLKELVKRYE

SEQ ID NO: 2441 - protein, 40 aa, Artificial Sequence
  Synthetic
EETYTFEGEEKAKRFMKELRKKNYDAKIEIHNGRYVVTAQ

SEQ ID NO: 2442 - protein, 40 aa, Artificial Sequence
  Synthetic
TVHLQLKDKEAAKKAAEKWQKKGYEVTLKKNGDTYEVQVD

SEQ ID NO: 2443 - protein, 43 aa, Artificial Sequence
  Synthetic
ATVHIQGVTYHFDNPEEAKRFAEEMAKKLGLQMEIHGNEIHVE

SEQ ID NO: 2444 - protein, 43 aa, Artificial Sequence
  Synthetic
GTLHVNGETYTGYDPDWLYKYALKIAKKKNLTIRIHGNTVQVH

SEQ ID NO: 2445 - protein, 40 aa, Artificial Sequence
  Synthetic
TTTYTFTDERQAQTFAEELRRRGYDVRYESHGTTYRVHVD

SEQ ID NO: 2446 - protein, 43 aa, Artificial Sequence
  Synthetic
DQKELQKQVKEAVKNGDEDRVKELLKRVGYSDEQVERIKDKLS

SEQ ID NO: 2447 - protein, 43 aa, Artificial Sequence
  Synthetic
TLDEARELVERAKKEGTGVDVNGQRFEDWREAERWVREQEKNK

SEQ ID NO: 2448 - protein, 40 aa, Artificial Sequence
  Synthetic
RITMHFDGEEQARKAVKEAKKRNLQAHVTVQNGKWVVHID

SEQ ID NO: 2449 - protein, 40 aa, Artificial Sequence
  Synthetic
EHTYTFDDRTQAETFAEEARRRGLRVEVRKENGTWKVRVQ

SEQ ID NO: 2450 - protein, 43 aa, Artificial Sequence
  Synthetic
EEEVRKIVKKLLDNGVSPEEVVEIVKRRGVDEDKVRQVVREVL

SEQ ID NO: 2451 - protein, 43 aa, Artificial Sequence
  Synthetic
TTVHVKGVTYHFDTLEQAVRFAQEVAKKLGSTFEIHGNTIHVN

SEQ ID NO: 2452 - protein, 43 aa, Artificial Sequence
  Synthetic
LTVHVNGYTYHFDEPEQAKKFVEEMAKKLGLQVHYKDGQFHVE

SEQ ID NO: 2453 - protein, 43 aa, Artificial Sequence
  Synthetic
IREELEKEAREVVKKGDEDRAREILQRAGLSPEQVERIIREVL

SEQ ID NO: 2454 - protein, 40 aa, Artificial Sequence
  Synthetic
KVTIRVHGPEQAKKLLEEAKRKNLKIEIRRHGDDIIIHIE

SEQ ID NO: 2455 - protein, 43 aa, Artificial Sequence
  Synthetic
KTVHVGNVTYHFDNPEKAKKFAEKVAKELGRTVEIHGDTLEVK

SEQ ID NO: 2456 - protein, 40 aa, Artificial Sequence
  Synthetic
RQRYEFDGEEQARKWAEHLKKHNLEVHVKIENGKYVVEAD

SEQ ID NO: 2457 - protein, 43 aa, Artificial Sequence
  Synthetic
AQVHVNGVTYDFDNPEKAKRFAEKMAKELNLQVHIHGEQFKVE

SEQ ID NO: 2458 - protein, 43 aa, Artificial Sequence
  Synthetic
EPKAQKIAQKLWNNGISEEEIKEILKRLGLNADEAAEALQKYE

SEQ ID NO: 2459 - protein, 40 aa, Artificial Sequence
  Synthetic
SVTYTFTGEDKARAFAEELKKRNLEFEVQIHNGNIIITVD

SEQ ID NO: 2460 - protein, 43 aa, Artificial Sequence
  Synthetic
TEDVRRWVEELFSKGKSPEEIKRLARKQGITEDEVDKAIKIAI

SEQ ID NO: 2461 - protein, 43 aa, Artificial Sequence
  Synthetic
MTVHIGNTTYHFDNPEEAKKFAEEMAKKLGLKIEHHGNTIKVQ

SEQ ID NO: 2462 - protein, 40 aa, Artificial Sequence
  Synthetic
KITVTVKGEEQMKQFIEMAKKQNLEVKVEVKNGKYILHAE

SEQ ID NO: 2463 - protein, 43 aa, Artificial Sequence
  Synthetic
PEEVEKHARELKKNGVSPEQIEEILRRQGVDERVIREVIKRVS

SEQ ID NO: 2464 - protein, 43 aa, Artificial Sequence
  Synthetic
TTVHVNGKKFTFDTPEYAEEWAKKVAKKLNQSVTVDGNTVTVK

SEQ ID NO: 2465 - protein, 40 aa, Artificial Sequence
  Synthetic
DLELRFHGEEQARKAYKHVVAQNLEVEIKQENGQWILHVR

SEQ ID NO: 2466 - protein, 43 aa, Artificial Sequence
  Synthetic
TTVTVNGQTVQLPSTEAAQKYAKKAAEEYNATLFIDGNQITVK

SEQ ID NO: 2467 - protein, 43 aa, Artificial Sequence
  Synthetic
KTVHVNGKTYKFPSPEAAEKFAREVAKKAGLTVKTDGNTFKVE

SEQ ID NO: 2468 - protein, 43 aa, Artificial Sequence
  Synthetic
MTVHVNGVQYDFDNPEKAKKFAEEVAKKLGLQVEYHGDTIRVE

SEQ ID NO: 2469 - protein, 43 aa, Artificial Sequence
  Synthetic
VTVHVQGVQYDFNNPEEALKFVKEMAERLNLTYEIHGNQIHVE

SEQ ID NO: 2470 - protein, 43 aa, Artificial Sequence
  Synthetic
DEEVEKRFKKLYDNGVDPREVKEYLKRQGVDPDAIKKAEEKVL

SEQ ID NO: 2471 - protein, 43 aa, Artificial Sequence
  Synthetic
AEVEVNGVTIKFSSPEQAEKYAKQVAKELNLQVTIHGEKFKVE

SEQ ID NO: 2472 - protein, 40 aa, Artificial Sequence
  Synthetic
TETRTFDDETQAREAAKEAQKRGLTYRIKQEGTTWKVEID

SEQ ID NO: 2473 - protein, 40 aa, Artificial Sequence
  Synthetic
TREETVTNDEKAERIIRELKKLGLQVHYTKENGTWRIEIR

SEQ ID NO: 2474 - protein, 43 aa, Artificial Sequence
  Synthetic
TEVHLGNLTWTFDNPEEAKEFAEKLAKKQNAKIEYKGDHYEIE

SEQ ID NO: 2475 - protein, 40 aa, Artificial Sequence
  Synthetic
SETYTVTGEEQAKKIIEMAKRRNLKVEVEHHGDRIILTLK

SEQ ID NO: 2476 - protein, 43 aa, Artificial Sequence
  Synthetic
SEKAKRIAKKLIKNNQSEDKIREILERLGVSTDDADQLIRDIK

SEQ ID NO: 2477 - protein, 43 aa, Artificial Sequence
  Synthetic
SDKAEKIAKKLSENGKSTKEIERVLRELGVSDDEAEEILRRYG

SEQ ID NO: 2478 - protein, 43 aa, Artificial Sequence
  Synthetic
KTVHVDGLTYHFENPEKAVRFALEYAKKKGLQVHIHGETIEIH

SEQ ID NO: 2479 - protein, 43 aa, Artificial Sequence
  Synthetic
YTVDVNGVKYTFSSLEEALKFADEVARKLGGTYELHGHTIHVK

SEQ ID NO: 2480 - protein, 43 aa, Artificial Sequence
  Synthetic
TTVTVNGITRTFPNPEEAAKFAKKVAKEAGLTVEVHGNTVEVH

SEQ ID NO: 2481 - protein, 43 aa, Artificial Sequence
  Synthetic
GTVKVGDTTYTFPNPEEAIKFAQKVAKKLNKPVTVRGNTVKVK

SEQ ID NO: 2482 - protein, 40 aa, Artificial Sequence
  Synthetic
SVTYHTEGEEQAKYLIKWAKANNLEVHVEIRNNRLVVHIS

SEQ ID NO: 2483 - protein, 43 aa, Artificial Sequence
  Synthetic
PPEAEERARRLLKNGKTPEYIKKYLQKQGVDESEAEEAIKRAL

SEQ ID NO: 2484 - protein, 43 aa, Artificial Sequence
  Synthetic
LTVDVNGYTYHFDEPEQARKFIEELAKKLGLQVQWHGETVKVE

SEQ ID NO: 2485 - protein, 40 aa, Artificial Sequence
  Synthetic
RVTYHVEGEEAAEKVKRMLEKQNLEVHVEIHNGQYIITAE

SEQ ID NO: 2486 - protein, 43 aa, Artificial Sequence
  Synthetic
MTVHMGDLTWHFSSPEQAKEFAAKLAKKLGGTYTVNNGEIHVE

SEQ ID NO: 2487 - protein, 40 aa, Artificial Sequence
  Synthetic
KVTFRVHGDEARKRLVKWAKDQNLQIKYEVHGDQIIATVE

SEQ ID NO: 2488 - protein, 43 aa, Artificial Sequence
  Synthetic
VTIHVQGITYHFDNPEEAKKFVDRVAKELNLTVEFHGNTVHIE

SEQ ID NO: 2489 - protein, 40 aa, Artificial Sequence
  Synthetic
GDRIEFDGEEQALRFWKEMVKRNLKAEVQVHGDKWVVQVD

SEQ ID NO: 2490 - protein, 43 aa, Artificial Sequence
  Synthetic
MEEYEKDAKRLLRNGTDADQVAKILKKKGVDDEVIKEIKKKLS

SEQ ID NO: 2491 - protein, 40 aa, Artificial Sequence
  Synthetic
EYHWTVHGEEQMRRAEKLAKAMNLKVEVHRHGDRFIITAK

SEQ ID NO: 2492 - protein, 40 aa, Artificial Sequence
  Synthetic
SITVEVHGEEALRRAEEIMRRQNLEVEVEQKGNKWILHAK

SEQ ID NO: 2493 - protein, 43 aa, Artificial Sequence
  Synthetic
NEEELKRRAEEIVRRGQPLEILGIKVTTPEEARKAAEALWRQL

SEQ ID NO: 2494 - protein, 40 aa, Artificial Sequence
  Synthetic
GFTVETSGEEDMRRIVEMLRRRNLKAEVHVENGKWKVTAK

SEQ ID NO: 2495 - protein, 43 aa, Artificial Sequence
  Synthetic
ATVHVDNVTYHFSNPEQADKFAKKVAKELGRTVELHNGTWHIE

SEQ ID NO: 2496 - protein, 43 aa, Artificial Sequence
  Synthetic
KTVHVNGVEYRFPNPEQAKEFAKEIAKKLGLKVEIHGETIRVE

SEQ ID NO: 2497 - protein, 43 aa, Artificial Sequence
  Synthetic
TTVRVGDYKYKYPNPELAKKAAEELAKKLGGTVEKHNGTFHVK

SEQ ID NO: 2498 - protein, 43 aa, Artificial Sequence
  Synthetic
SEEKKKAKERLERLGASSELARELLDRANGNAEKAERLLRKLL

SEQ ID NO: 2499 - protein, 43 aa, Artificial Sequence
  Synthetic
KQVTVNGKTFTYPTADAAIKAAKKLAKKFNLTVHVHGNQIKIT

SEQ ID NO: 2500 - protein, 43 aa, Artificial Sequence
  Synthetic
LQVHVNGVTYNFDTPEELKRFVEKVVKSLGLTVEWHGNQVHVE

SEQ ID NO: 2501 - protein, 43 aa, Artificial Sequence
  Synthetic
DERVERIVRRLYRNGVDPDQVRKILQRQGIDEKEVQEAVKNVV

SEQ ID NO: 2502 - protein, 43 aa, Artificial Sequence
  Synthetic
TTVDVGNVTYHFTNPEQMVKFAQEVAKKLNLRLEFHGNKIRVE

SEQ ID NO: 2503 - protein, 40 aa, Artificial Sequence
  Synthetic
EETYEVDGEEQLKKVEKMLRDRNLDVEVEIHNGKFVIRAK

SEQ ID NO: 2504 - protein, 40 aa, Artificial Sequence
  Synthetic
QITIEVHGEEAARRAIKEAKDRNLPFEVEVHGDRYVVHIK

SEQ ID NO: 2505 - protein, 43 aa, Artificial Sequence
  Synthetic
SEVHIKNVTYKFNNPEQAVEFAQKMAKKLNLRIEIHGDQVHVD

SEQ ID NO: 2506 - protein, 43 aa, Artificial Sequence
  Synthetic
REEARKIFQELKKRGVSEEEIKKRLKKLGVSEDEAEEARKAAG

SEQ ID NO: 2507 - protein, 43 aa, Artificial Sequence
  Synthetic
DEEELKKRLEEVVRQKDEDRVREILKRQGVDDRQVEEIVRKLM

SEQ ID NO: 2508 - protein, 40 aa, Artificial Sequence
  Synthetic
QIDYHLHGDEQAKKVIEWAQRANLEYEVQVHNGEWVIHVR

SEQ ID NO: 2509 - protein, 40 aa, Artificial Sequence
  Synthetic
EITWHVTGEEQAKKVIEYARRANLELHVHVHGDHIVATAK

SEQ ID NO: 2510 - protein, 43 aa, Artificial Sequence
  Synthetic
AEVTVNGVKYEFDNPEKAKKFADKIAKDLNGTYEIHGNHIHVE

SEQ ID NO: 2511 - protein, 40 aa, Artificial Sequence
  Synthetic
EIDIEVEGEEKAKEVMDKARKNNLKYEVQVHNGRWVITLK

SEQ ID NO: 2512 - protein, 43 aa, Artificial Sequence
  Synthetic
DEKVKKLVEEVRRRGLSKEEIEELLRKQGVSDDEIRKVQELVE

SEQ ID NO: 2513 - protein, 43 aa, Artificial Sequence
  Synthetic
KTVTINGVNYTFDNPEEAVKFALEMAKKQNLRLEFHGDQMHIE

SEQ ID NO: 2514 - protein, 43 aa, Artificial Sequence
  Synthetic
GQVFVNGTYVKAPSPEAAKKIAEKLAKIYNLQFTVRGDTVELH

SEQ ID NO: 2515 - protein, 43 aa, Artificial Sequence
  Synthetic
TQVDINGLTYTFSSPREMVEFALKLVRSQNLHIEFHGNTVKVE

SEQ ID NO: 2516 - protein, 40 aa, Artificial Sequence
  Synthetic
EIEITTEGPEQAKKVMNEAKKQNLEAHVRVENNRWIVHIK

SEQ ID NO: 2517 - protein, 43 aa, Artificial Sequence
  Synthetic
ATVQMGNLEWHFNNPEEAYKFAEKLAKEYNLELKVHGDTYKIE

SEQ ID NO: 2518 - protein, 40 aa, Artificial Sequence
  Synthetic
KETYHVHGEEQARRVLEKAKRRNLRAEVEIHNGEFIIHVE

SEQ ID NO: 2519 - protein, 43 aa, Artificial Sequence
  Synthetic
MEEVKKIVEELRRKNQTTLNINGQTYQTEDVDHLAKIVYKLKY

SEQ ID NO: 2520 - protein, 40 aa, Artificial Sequence
  Synthetic
SQRYEVEGPEQAKKLAEELKKQNLDVKIEIHGNKFVVKAS

SEQ ID NO: 2521 - protein, 40 aa, Artificial Sequence
  Synthetic
KTTITVTDKENARKVVEELRRRGLTVTYTHENGTVTITYG

SEQ ID NO: 2522 - protein, 43 aa, Artificial Sequence
  Synthetic
SEVNINGEQYHFPSLDAAIDWAKKVAEKYNLKYTVKNGKITVK

SEQ ID NO: 2523 - protein, 43 aa, Artificial Sequence
  Synthetic
LTVHMQGITYTFPNPEEAVRFALELAKKLGLKVEFHGNTIHIE

SEQ ID NO: 2524 - protein, 43 aa, Artificial Sequence
  Synthetic
EELVKKVVREVQEKNLSKEQLEDILKKLGVSDEAIKEAKRLLD

SEQ ID NO: 2525 - protein, 40 aa, Artificial Sequence
  Synthetic
SITIEQDGEEAAKRVIKIAKAQNLEVHVKVENGKWIITIS

SEQ ID NO: 2526 - protein, 43 aa, Artificial Sequence
  Synthetic
PEEIKKTIKELRKNGVSPEEVKEILQRLGVSDEQVERVLKQVL

SEQ ID NO: 2527 - protein, 43 aa, Artificial Sequence
  Synthetic
DDEIKEIVERLQRNGIDKEQIHEILRQAGVDERQVKKVLEQFY

SEQ ID NO: 2528 - protein, 43 aa, Artificial Sequence
  Synthetic
TTVKINNKEYTFPTQDAAKKFAEKLAKSLGLEVQFKNNTFTVH

SEQ ID NO: 2529 - protein, 43 aa, Artificial Sequence
  Synthetic
YRVDVNGVTYTFDSLEQALKFAEEMAKKLNGTYQVHGDTIKVE

SEQ ID NO: 2530 - protein, 43 aa, Artificial Sequence
  Synthetic
SQVHINHTTYHFDNPEEAVKWALKVAQKLGLEFQLHNGEIQVH

SEQ ID NO: 2531 - protein, 43 aa, Artificial Sequence
  Synthetic
KTVTINGETYHFPSPDAAKRWAQELAKKLNLTVEVHGNHIEVH

SEQ ID NO: 2532 - protein, 43 aa, Artificial Sequence
  Synthetic
DEEDELADRLAKELNLSPEQLVQWARRQGDEKVVRAAELLKKL

SEQ ID NO: 2533 - protein, 43 aa, Artificial Sequence
  Synthetic
DTKDELIKRVARKQGTDPRDVRRQLKERGLSDEQVEEWLRRVI

SEQ ID NO: 2534 - protein, 43 aa, Artificial Sequence
  Synthetic
DEEVEKLIRELLERGVSKEQIRQIVQRQGIDDRQIEEVYKKVS

SEQ ID NO: 2535 - protein, 40 aa, Artificial Sequence
  Synthetic
QEHITVQGEEKARRVVEEMKRRNLKVELHQENGKWIITIE

SEQ ID NO: 2536 - protein, 43 aa, Artificial Sequence
  Synthetic
SEDEERKKAEKAARDGNKDKAQEILERLGYSPQEAREIIKKLE

SEQ ID NO: 2537 - protein, 43 aa, Artificial Sequence
  Synthetic
ATVHVNGLTYHFSNPEQAKEFAKKVAEKLNLTVEYHGETVEVK

SEQ ID NO: 2538 - protein, 43 aa, Artificial Sequence
  Synthetic
SEKAKKVAEELKKRGYSPEEIAQILQKLGFSDKEANEAKKYVK

SEQ ID NO: 2539 - protein, 40 aa, Artificial Sequence
  Synthetic
ALTFHMHGEEQLKKVVEMLQKMNLDVKWRQENGQWIVTAE

SEQ ID NO: 2540 - protein, 40 aa, Artificial Sequence
  Synthetic
EIEYEFEGEEKARAMYKAAAKHNYEAHIRVENGKYIVHVK

SEQ ID NO: 2541 - protein, 43 aa, Artificial Sequence
  Synthetic
EDEAVKIFKELKKRGVDPEQVKDILRKQGLDADRVEELVKREE

SEQ ID NO: 2542 - protein, 43 aa, Artificial Sequence
  Synthetic
LEVEVNGVRYTFSSPEEAKRFAEEVAKKLQLKVEFHGETIHVE

SEQ ID NO: 2543 - protein, 40 aa, Artificial Sequence
  Synthetic
GVRYTFDGEEKARKAMEALHRQNLQVEITIENGRWVVRAE

SEQ ID NO: 2544 - protein, 43 aa, Artificial Sequence
  Synthetic
ATVEFGNVTWDFRSLEEAKKMVEKLVKEYQGTVEVHGNKFKVE

SEQ ID NO: 2545 - protein, 43 aa, Artificial Sequence
  Synthetic
KTVHMNGIQYHFSNPEEAEKFAKEMAKKLNLKVEFHGDTIRVE

SEQ ID NO: 2546 - protein, 43 aa, Artificial Sequence
  Synthetic
DEEQERVKKLAKKLGFSPDQAEEVLQRAGGDPEQARKILEKLY

SEQ ID NO: 2547 - protein, 43 aa, Artificial Sequence
  Synthetic
ATVHVGNVTYHFPNPEEAKKFAEEVAKKLNLQVEYKDGEFHIK

SEQ ID NO: 2548 - protein, 43 aa, Artificial Sequence
  Synthetic
KTVHWGNYTVTFENPEKAKKFAKEVAEKLGLTVKYHGEEIRVE

SEQ ID NO: 2549 - protein, 43 aa, Artificial Sequence
  Synthetic
TTVHVDGLTYHFDNPEEAKKFVKEILEKQQRTVEVHNGEYHIK

SEQ ID NO: 2550 - protein, 43 aa, Artificial Sequence
  Synthetic
TQVHVGNTTLHFPNPQLALKAAQQIAKELGLEVTIKNGNVTIH

SEQ ID NO: 2551 - protein, 43 aa, Artificial Sequence
  Synthetic
TTVHVNGQTYHFDDPREVEKFVKTVASRLNLRVERHGDTWHVS

SEQ ID NO: 2552 - protein, 40 aa, Artificial Sequence
  Synthetic
RITITTHGKEQAMKAMKKMQAQNLEVHVRVENGQWVITAD

SEQ ID NO: 2553 - protein, 40 aa, Artificial Sequence
  Synthetic
RETYTFNGEEKARRFLEEMKKRNLNAEIRIENGQWIIHVD

SEQ ID NO: 2554 - protein, 43 aa, Artificial Sequence
  Synthetic
AEVHVNGVTYKFDEPEQAKKFAKEVAKKLNLTMEIHGEQIHVE

SEQ ID NO: 2555 - protein, 43 aa, Artificial Sequence
  Synthetic
LTVHVNGLTYHFDNPEEVEKFVKKMVKDLGGNVEVRGETYHVE

SEQ ID NO: 2556 - protein, 43 aa, Artificial Sequence
  Synthetic
DEEAKKTVKELVERGVDPRQVKDVAKKLGLDPREVEEIIQRVL

SEQ ID NO: 2557 - protein, 43 aa, Artificial Sequence
  Synthetic
ITIHVNGVTYHFDNPEEAEKFAQKMAKTYQLKMEIHNGEFHME

SEQ ID NO: 2558 - protein, 43 aa, Artificial Sequence
  Synthetic
TSEEVEKRVEEVLRKGQPITINGVTLTDPTEIERFLRKVQKKF

SEQ ID NO: 2559 - protein, 43 aa, Artificial Sequence
  Synthetic
GTVHVGDQTYTLPTTKLAEELAKKLAKKYNLTVEKHGNTFKLE

SEQ ID NO: 2560 - protein, 40 aa, Artificial Sequence
  Synthetic
GITVTFEGEEKARRFMKEMHKRNLEVHIKQENNRWVVTAE

SEQ ID NO: 2561 - protein, 43 aa, Artificial Sequence
  Synthetic
SPEAKRIFEELVKNGVSEEEAKEILRQLGFSEEEIQKAVKKAK

SEQ ID NO: 2562 - protein, 40 aa, Artificial Sequence
  Synthetic
RITYHFDGEEQARKQIKWAQKANLSYKVQIENGKWVIHVE

SEQ ID NO: 2563 - protein, 43 aa, Artificial Sequence
  Synthetic
PQEELKKEAKRLAQSGNPEEARRLLKEAGLSEDTARKFVEKFL

SEQ ID NO: 2564 - protein, 43 aa, Artificial Sequence
  Synthetic
GTVHVGDFKYTAPNPQKAIEWAKKFAKKKNLTVHVHGNTVTVK

SEQ ID NO: 2565 - protein, 43 aa, Artificial Sequence
  Synthetic
KEEAKKQVEKLLKNGVDDRQVQEVLKRLGVDDKQVEEIVKKLK

SEQ ID NO: 2566 - protein, 43 aa, Artificial Sequence
  Synthetic
TTVFVGNTTWTFDTKEKAKKAAEKLAKKYNLTVHTHGGKFELK

SEQ ID NO: 2567 - protein, 43 aa, Artificial Sequence
  Synthetic
SDDAKEYLKQLLEDGVSEEEAKRRAKKYGLSEDEADQAIKEWK

SEQ ID NO: 2568 - protein, 40 aa, Artificial Sequence
  Synthetic
KKTIKFDNQEQAEQAAKKAKKKGLEVKVHKLNGTWVLQIG

SEQ ID NO: 2569 - protein, 43 aa, Artificial Sequence
  Synthetic
GTLKVGNQTYTFDSPEQAKEAAEKFAQKYNLTYSLKNGTVTVK

SEQ ID NO: 2570 - protein, 43 aa, Artificial Sequence
  Synthetic
TTIQVGNTTYTASSPEQAEEIAKKLAKKYNLTVHNDNGDIKLE

SEQ ID NO: 2571 - protein, 43 aa, Artificial Sequence
  Synthetic
PDEKERVRKKLEKQGVSSEDAKKIVEKANGNEDKAQEILKRLL

SEQ ID NO: 2572 - protein, 40 aa, Artificial Sequence
  Synthetic
TTEYTYTDENEARRAKKEIEKKGLTVKVTKENGRWRVEVG

SEQ ID NO: 2573 - protein, 40 aa, Artificial Sequence
  Synthetic
EEHYTVEGTEAAKEFYKEMMKRNLNVEVKVENGKWIFTIK

SEQ ID NO: 2574 - protein, 40 aa, Artificial Sequence
  Synthetic
KITYEVHGEEQARRLAKHLKAQNLKVEIHVHNGKIIVHAE

SEQ ID NO: 2575 - protein, 43 aa, Artificial Sequence
  Synthetic
TEVHVGNVTYQFKTLEEARKFAEKVAKDLGLQVEVHGNTFRVE

SEQ ID NO: 2576 - protein, 43 aa, Artificial Sequence
  Synthetic
AEEVKRLIERLKRNGVSDEEIRKILKRQGIDDRQVEEAERQFK

SEQ ID NO: 2577 - protein, 40 aa, Artificial Sequence
  Synthetic
TRTETYTNPEEAERVWRELANRGLDVRLEQDGTTWRVEIR

SEQ ID NO: 2578 - protein, 40 aa, Artificial Sequence
  Synthetic
TEEYTFTDPREAERFAREAKKKGLDVTVSKHGTTLTVRIG

SEQ ID NO: 2579 - protein, 40 aa, Artificial Sequence
  Synthetic
SFTITYDGEELAKKILEMMKKRNLEAHVEIRNGKFTITVS

SEQ ID NO: 2580 - protein, 43 aa, Artificial Sequence
  Synthetic
GQVKVNGKTFQFPSPEEAKKFAQEIAKKLGLQVEVHGTTVKVT

SEQ ID NO: 2581 - protein, 43 aa, Artificial Sequence
  Synthetic
TTVRVNGIKLTYPTPELAKKAAQKLAKKYNLTVTVTGNHVEVE

SEQ ID NO: 2582 - protein, 43 aa, Artificial Sequence
  Synthetic
PTEELKRRAKEALKNGNKDKAKELLKRAGISEDKAEEIIKRLE

SEQ ID NO: 2583 - protein, 43 aa, Artificial Sequence
  Synthetic
LQVHVNGVTYHFDEPEQAKKFAEEMAKKLGGTFEIRGETIHVK

SEQ ID NO: 2584 - protein, 43 aa, Artificial Sequence
  Synthetic
ITVDVKGLEYHFNNPEQVKKFVKEVAKKLNATVQFHGDRVKVD

SEQ ID NO: 2585 - protein, 40 aa, Artificial Sequence
  Synthetic
EIKITVEGEEQMRKVEEEMKRRNLELKVEIHGNQLIIRAS

SEQ ID NO: 2586 - protein, 43 aa, Artificial Sequence
  Synthetic
TTVKVNGTEYQVESPEQAEKLAQKLAKKYNLTVHKHGNTFEVK

SEQ ID NO: 2587 - protein, 43 aa, Artificial Sequence
  Synthetic
PKEEAKRRAEEAVKNGDEDLARELLERAGISPEEADKIIKELQ

SEQ ID NO: 2588 - protein, 43 aa, Artificial Sequence
  Synthetic
TPELAKAALQAAKEGKTQVNFGDVTLHFPSPDAAKKFAQKVLE

SEQ ID NO: 2589 - protein, 43 aa, Artificial Sequence
  Synthetic
STLHVNGTTYTFPTTKAAIEYAQKLAKKLNLEVRVHNGHVTVK

SEQ ID NO: 2590 - protein, 40 aa, Artificial Sequence
  Synthetic
SITYTSEGSEQARHWYEWAIKQNLEVHVRVQNGRYIIDIS

SEQ ID NO: 2591 - protein, 40 aa, Artificial Sequence
  Synthetic
SFHMTVEGEEAAKKVIEIARRQNLEVHVEKHGNRYILQID

SEQ ID NO: 2592 - protein, 40 aa, Artificial Sequence
  Synthetic
KITITVDGEEAAKEIKKMAEKRNLKAEIQIHNGKYVIHIE

SEQ ID NO: 2593 - protein, 40 aa, Artificial Sequence
  Synthetic
EWTITVEGEEQAKKAAKIAKAMNLQVRIEIHGDQIVITAQ

SEQ ID NO: 2594 - protein, 43 aa, Artificial Sequence
  Synthetic
PKEEAKKKAKKALDNGNKDKAREILKRAGFSEDEAEEILKKLE

SEQ ID NO: 2595 - protein, 43 aa, Artificial Sequence
  Synthetic
TWKELAEAAKLALKNNKTYTVGDIQIKNQDQAQKLLEKAQKIL

SEQ ID NO: 2596 - protein, 43 aa, Artificial Sequence
  Synthetic
LTIHVGNVTYHFSNPEEALKFAQQVAKELGLQMHVHGETIEMH

SEQ ID NO: 2597 - protein, 43 aa, Artificial Sequence
  Synthetic
ATMHMDGLTFTFPNPEQAYKFALEIAQKQGRQLEVHGNTLHIE

SEQ ID NO: 2598 - protein, 43 aa, Artificial Sequence
  Synthetic
QKEEAKKKVEEALRRGNEEKARRIAKKAGISDEEYERIKRKAL

SEQ ID NO: 2599 - protein, 43 aa, Artificial Sequence
  Synthetic
SQVQVNNTTYTFTSPEQAKEWAEKLAKKLGKKVTKQGDFFKVE

SEQ ID NO: 2600 - protein, 43 aa, Artificial Sequence
  Synthetic
GEKARRIAKKALKNGASPDEIKEILKRAGVSEDEAEQIVQELF

SEQ ID NO: 2601 - protein, 43 aa, Artificial Sequence
  Synthetic
GTFTVGNTTFTAPTQEAAEKLAKKWAKKLNLTVTKINGTWQVH

SEQ ID NO: 2602 - protein, 40 aa, Artificial Sequence
  Synthetic
EIHLTFDGEEKAREAEKEARKRNLKVELQIHNGKWIVTIE

SEQ ID NO: 2603 - protein, 40 aa, Artificial Sequence
  Synthetic
TTTYRTTDETNARKLAKEAKRRGLTVRIRHKNGEWRVEVR

SEQ ID NO: 2604 - protein, 43 aa, Artificial Sequence
  Synthetic
SQDDILRKVHEALKNGDDEKVQKLAKKAGIDPEEVKEIVRRKF

SEQ ID NO: 2605 - protein, 40 aa, Artificial Sequence
  Synthetic
QIHIEVHGEELAKKIYKALADQNLNVELHKHGDQIIITAE

SEQ ID NO: 2606 - protein, 43 aa, Artificial Sequence
  Synthetic
ATVHIGNVTYHFDNPEEADKFAKEMAKKLGLTLEVRGNTWHVE

SEQ ID NO: 2607 - protein, 43 aa, Artificial Sequence
  Synthetic
SPDAEQALIDAAKDNRPITVNGQTVSPGDPQWKKALKKLKKQL

SEQ ID NO: 2608 - protein, 43 aa, Artificial Sequence
  Synthetic
TTIQVNGQKYTLPSPDLAIKLAKQLAKKYNLTVHVKGNKVTVE

SEQ ID NO: 2609 - protein, 40 aa, Artificial Sequence
  Synthetic
TKEVTVTNPENARRVIEELKNRGITVDVTTENGTFRIRYD

SEQ ID NO: 2610 - protein, 43 aa, Artificial Sequence
  Synthetic
QKVTVGNTTFTFDTPEEAQKFAKKIAKKLNLELHIHGKTIEVE

SEQ ID NO: 2611 - protein, 40 aa, Artificial Sequence
  Synthetic
RSRITVPSEETARRLAKKYASQGITVTVTVSGGKWHVEFE

SEQ ID NO: 2612 - protein, 43 aa, Artificial Sequence
  Synthetic
SDEVREKVERLLRNGVDPRQVVEDLKRQGYDEDEVRRLVEEIK

SEQ ID NO: 2613 - protein, 43 aa, Artificial Sequence
  Synthetic
DEREVKKRVHELIRNGDEDRARKVIKDAGLDDRVWEDIHRKIH

SEQ ID NO: 2614 - protein, 43 aa, Artificial Sequence
  Synthetic
DEREVVEIVKKAKENGDEERVKKALRKANISEEQVEELWQKIF

SEQ ID NO: 2615 - protein, 43 aa, Artificial Sequence
  Synthetic
ITVHVEGVTYHFDNPEEAMKFADRMAKELGRTFELHNGTVHME

SEQ ID NO: 2616 - protein, 43 aa, Artificial Sequence
  Synthetic
TTVHVNGVQYHFPNPEEMWKFVERVAKEKGLTYEVRGDDVKVE

SEQ ID NO: 2617 - protein, 43 aa, Artificial Sequence
  Synthetic
LEEVERIVEELLKRGVDDEQIKEILKRAGVSDEEVEKAIKKVK

SEQ ID NO: 2618 - protein, 43 aa, Artificial Sequence
  Synthetic
IEEEVKKKVEEVVRRGDEDRAKEILRRAGIDPRQVEEIIRRLL

SEQ ID NO: 2619 - protein, 43 aa, Artificial Sequence
  Synthetic
TVVIVNGKKIQASSPEEAQKIAKKAAKKYNLTVHIEGNQVTVK

SEQ ID NO: 2620 - protein, 43 aa, Artificial Sequence
  Synthetic
RPKEYEKKAEEAARRGDPDTARELLKKAGYSPDEAEEILRRIL

SEQ ID NO: 2621 - protein, 40 aa, Artificial Sequence
  Synthetic
AIQYDVEGEEKAKRIKKMLEARNLEVEVEIHNGRFILKAK

SEQ ID NO: 2622 - protein, 43 aa, Artificial Sequence
  Synthetic
DTVKFNGLTYHFPNPQKAKEFAEKAAKKYNAKVTVKNGEFTVQ

SEQ ID NO: 2623 - protein, 40 aa, Artificial Sequence
  Synthetic
TQQYTYPTKDEAKKAQKKFKKEGLEVHLTQENGKWSVKVH

SEQ ID NO: 2624 - protein, 43 aa, Artificial Sequence
  Synthetic
SEELKKALEKAYKKNLTKVTVGDITVKFHSQDALEKYYKIAQN

SEQ ID NO: 2625 - protein, 43 aa, Artificial Sequence
  Synthetic
QTVKVGDLTYKGLSPEQAQKVAKKLAKKYQLTVHVHGNTVEVH

SEQ ID NO: 2626 - protein, 43 aa, Artificial Sequence
  Synthetic
IEKVERLVRELLQRGVDKKQIKEILKRQGIDEDEVRKAQEKVK

SEQ ID NO: 2627 - protein, 43 aa, Artificial Sequence
  Synthetic
PDEARRLAEELKKNGVSPEEIKKYLEKAGVDPREAEEVIKEVE

SEQ ID NO: 2628 - protein, 43 aa, Artificial Sequence
  Synthetic
LTVEVNGVEYRFDNPEQAKKFVEKMVKTYQLQYELNGNKWKVE

SEQ ID NO: 2629 - protein, 43 aa, Artificial Sequence
  Synthetic
MTVQVKGVKYQFDKPEQAEKFAKEMAKKQNLEVRLKDGTFHVE

SEQ ID NO: 2630 - protein, 43 aa, Artificial Sequence
  Synthetic
PDDVKKIFEKLLRNGVSKEKAKQILKKIGVSEDEAEEAARKVL

SEQ ID NO: 2631 - protein, 43 aa, Artificial Sequence
  Synthetic
TEVHIGNVTYHFDEPEQAKKFADEMAKRLGRTYELHNGQIHVE

SEQ ID NO: 2632 - protein, 43 aa, Artificial Sequence
  Synthetic
PEKVERIVRELKKNGVDDRQVEDILRKAGVDEREIKKVQREIG

SEQ ID NO: 2633 - protein, 43 aa, Artificial Sequence
  Synthetic
STVHLGNYQYHYPTPQLAIEAAKKLAKKFNAQVHVDGDTIKVT

SEQ ID NO: 2634 - protein, 43 aa, Artificial Sequence
  Synthetic
AQVHVGGYTYHFSNPEEAYKFALEMAQRLNLQLEVHGEQLKVK

SEQ ID NO: 2635 - protein, 43 aa, Artificial Sequence
  Synthetic
SQVHIGNTTYTFPTAELAEKAAKKLAKKYNLQYHQDGNKYEVK

SEQ ID NO: 2636 - protein, 40 aa, Artificial Sequence
  Synthetic
KVTFEVHGEEALRKAIKAAKDMNLSVKVEVHNGKYVVHAE

SEQ ID NO: 2637 - protein, 43 aa, Artificial Sequence
  Synthetic
SDLEELIKEAQKKANGNDDKAEKILRDSGNEDAAELLRKKLEG

SEQ ID NO: 2638 - protein, 43 aa, Artificial Sequence
  Synthetic
LTVHMGNVTYHFSSPEEAKKFAKEVAKKAGMQVHIHGETIKVE

SEQ ID NO: 2639 - protein, 43 aa, Artificial Sequence
  Synthetic
QRVQVNGVTYEFENPEKAKKFAEEVAKKLNLEVQLHNGTYHVE

SEQ ID NO: 2640 - protein, 40 aa, Artificial Sequence
  Synthetic
EITFHVEGEEQVKKVLKEAKKRNLKAEVRVENGKWIIHAK

SEQ ID NO: 2641 - protein, 43 aa, Artificial Sequence
  Synthetic
AEVHIGNVTYKFDKPEQARKFAEKVAKELGLQMEIHGDTVHVE

SEQ ID NO: 2642 - protein, 43 aa, Artificial Sequence
  Synthetic
RDDEIRERLKQALEKGNEEVLRELAERLGISTEEAKREAKKYA

SEQ ID NO: 2643 - protein, 40 aa, Artificial Sequence
  Synthetic
SYRYEVTSEEQLQRLYKMLAKMNLEVHVEIHGDRAIVQAS

SEQ ID NO: 2644 - protein, 40 aa, Artificial Sequence
  Synthetic
TTTRTFTDETEVRKVVEELKRRGYTVTVTEKNGKWTITRG

SEQ ID NO: 2645 - protein, 43 aa, Artificial Sequence
  Synthetic
GTIKIGDTTYKYPNPEEAKKVAKKLAKKYNLELHIHGNTIKIK

SEQ ID NO: 2646 - protein, 43 aa, Artificial Sequence
  Synthetic
MHVDVDGLTYQFNNPEEALKFVAKVVKEQQRTYEIHGNTIKIE

SEQ ID NO: 2647 - protein, 43 aa, Artificial Sequence
  Synthetic
TVDDIKKEVEEALKRGEPVHIDGIEVRSEEAAKRLLDALRKQE

SEQ ID NO: 2648 - protein, 43 aa, Artificial Sequence
  Synthetic
TTVHIGDETYHFDTTDKAKKYALKIAKKLGLTVQVHNGKLEVQ

SEQ ID NO: 2649 - protein, 43 aa, Artificial Sequence
  Synthetic
QPEAEKLAEELLRRGVSTDEIRKILKKAGVSPEDIDRISKKID

SEQ ID NO: 2650 - protein, 43 aa, Artificial Sequence
  Synthetic
DKDKVQEQIKEAVRNGNEEKVKELLKRQGISDEQVKEIARRLV

SEQ ID NO: 2651 - protein, 40 aa, Artificial Sequence
  Synthetic
DETYTVEGEEQAKHWAKIAKDRNLEYEIQVHNGQYIITIR

SEQ ID NO: 2652 - protein, 40 aa, Artificial Sequence
  Synthetic
QIRITTEGPEQARRLYEEAVKRNLEVHLEVHNNQWVLKIH

SEQ ID NO: 2653 - protein, 43 aa, Artificial Sequence
  Synthetic
PPDEYRKAEEALERGEPVTVNGKTYQPGDPELKKLAKYWRDKF

SEQ ID NO: 2654 - protein, 40 aa, Artificial Sequence
  Synthetic
TTTYHVQDEEAAQKLAKKLKKNGKEVHLTQKNGTWEIEEK

SEQ ID NO: 2655 - protein, 43 aa, Artificial Sequence
  Synthetic
PSEELRKRAEKAAKNGDTKTAEELLRRAGISEDEIKEILTKLS

SEQ ID NO: 2656 - protein, 43 aa, Artificial Sequence
  Synthetic
TTVHVNGLTFHFSKPEQMYKFAVEVARKAGLQVEFHGDEVHVE

SEQ ID NO: 2657 - protein, 43 aa, Artificial Sequence
  Synthetic
RDEIVKEVREEYKKGVSEDEIKERLQRQGVSDEEVKKIIDRAI

SEQ ID NO: 2658 - protein, 40 aa, Artificial Sequence
  Synthetic
RVTYEKHGEEQAKKLLDIARKRNLRAEVHIHNGQFIITLE

SEQ ID NO: 2659 - protein, 40 aa, Artificial Sequence
  Synthetic
TTEITVTNPENAKRVAEELKRRGKDFRVTETNGTFRIEVR

SEQ ID NO: 2660 - protein, 40 aa, Artificial Sequence
  Synthetic
TTTFSFTDEREARKFANEAKKRGLTVRTERRGTEFRVEIG

SEQ ID NO: 2661 - protein, 43 aa, Artificial Sequence
  Synthetic
QRVTMNGIEYKFENPEQVKEFAKRMAETKGLEIRVKDGTFEMR

SEQ ID NO: 2662 - protein, 43 aa, Artificial Sequence
  Synthetic
GTVVVNGQEYRFDTPEQVERFVKTLAKRLQLQVHDKNGKFELH

SEQ ID NO: 2663 - protein, 43 aa, Artificial Sequence
  Synthetic
KTVDVDGLEYHFDNPEEALKFALEMAKKLNLTVQVHGDRIKVK

SEQ ID NO: 2664 - protein, 43 aa, Artificial Sequence
  Synthetic
PDEAAKRAEELLKNGVNPDEVKDELRKLGVSDEEARQAVELAL

SEQ ID NO: 2665 - protein, 43 aa, Artificial Sequence
  Synthetic
AEVEVNGVRYKFSSPEQARKFADKVAKSLGLTYEIHGDTVHVE

SEQ ID NO: 2666 - protein, 43 aa, Artificial Sequence
  Synthetic
GTVFINGQTYTVPTPEKAKKLAEKLAKKYQGKVHVHGNKFQVQ

SEQ ID NO: 2667 - protein, 43 aa, Artificial Sequence
  Synthetic
TTVVIGNTRYTYPTHDKAKKFAEEYAKKYNLTVETHNGQIELH

SEQ ID NO: 2668 - protein, 43 aa, Artificial Sequence
  Synthetic
DERVKKIIKELLDRGVSDDEVRKIVKDQGVDERQIEDVLRKVK

SEQ ID NO: 2669 - protein, 43 aa, Artificial Sequence
  Synthetic
PDKKKKIVKKLLNKGLDKSEVEKEARKNGISDDIVEQAYKEWL

SEQ ID NO: 2670 - protein, 43 aa, Artificial Sequence
  Synthetic
DDQAQKEAEKILRNGGSKEQARKFLEEAGYSEEEARRILKKLE

SEQ ID NO: 2671 - protein, 43 aa, Artificial Sequence
  Synthetic
KTVNVQGVTYHFPTPEEAKKFAKEMAKKLNLTLEVHGDTFRVE

SEQ ID NO: 2672 - protein, 43 aa, Artificial Sequence
  Synthetic
DEEELLKDALRAYKEGDEDRLEEIVRRLNVDKKQVVDRAQRLE

SEQ ID NO: 2673 - protein, 43 aa, Artificial Sequence
  Synthetic
MDEAEKIVRELVKNGVSPEQIKEILKRNGVSPDEVREAIRRVI

SEQ ID NO: 2674 - protein, 43 aa, Artificial Sequence
  Synthetic
TEKVERIVEELLRQGVSPEEIKRIAKRQGIDEKEVEKVIKKIS

SEQ ID NO: 2675 - protein, 43 aa, Artificial Sequence
  Synthetic
DEELKKLVEELRKKNVSKEEVEKIVRRNGFSDEQVEEVVRLVG

SEQ ID NO: 2676 - protein, 43 aa, Artificial Sequence
  Synthetic
DDRARRVVEELLRKGVSDDQVKDIAKKLNVDEREVDELIKRVK

SEQ ID NO: 2677 - protein, 43 aa, Artificial Sequence
  Synthetic
TQVHVDGVTYTFSNPEEAKKFADEMAKRKGGTWEIKDGHIHVE

SEQ ID NO: 2678 - protein, 40 aa, Artificial Sequence
  Synthetic
RIEIRVEGEEAAKKAAKKMKEQNLEVHIRVENGQFILHAD

SEQ ID NO: 2679 - protein, 43 aa, Artificial Sequence
  Synthetic
PEEARQRAEKLLRNGRDKSEVKEILERLGISSEEAEKLLREAL

SEQ ID NO: 2680 - protein, 40 aa, Artificial Sequence
  Synthetic
RITYHIEGEEAARKVAEELKRRNLEFEVRKHGDEVIITVD

SEQ ID NO: 2681 - protein, 43 aa, Artificial Sequence
  Synthetic
GEVHIGNVTYKFPNPEEAKKFAKEMAKKLGLKVEIHGDQMHVE

SEQ ID NO: 2682 - protein, 43 aa, Artificial Sequence
  Synthetic
DERVKRVEREVREKNLDERQLEEILRRLGVDERIIEEIKRRLS

SEQ ID NO: 2683 - protein, 43 aa, Artificial Sequence
  Synthetic
SEVQVGNLTFTADTVDEAEKIAKKYAKQYNLTVKVHGNTVKVE

SEQ ID NO: 2684 - protein, 40 aa, Artificial Sequence
  Synthetic
TETRTYTNPELAERIAEELRRRGLTLTVTKDGTTVTITWD

SEQ ID NO: 2685 - protein, 40 aa, Artificial Sequence
  Synthetic
TETYTFTDPRTAEEYARRLRKKGIPVRYTTHGTTVRVEVD

SEQ ID NO: 2686 - protein, 43 aa, Artificial Sequence
  Synthetic
GTLHINGQEYTWPSTEEAIKYAKKAAKKLGLTVEVHGNTIKVE

SEQ ID NO: 2687 - protein, 43 aa, Artificial Sequence
  Synthetic
TSVLVNGQEYKFNDPRQVKDFVRKVVEKLNLTYSEENGVFKVS

SEQ ID NO: 2688 - protein, 43 aa, Artificial Sequence
  Synthetic
SPEAKRIVEELIRKGLDPEEAAQIAQKNGYNPEEIKQALKEIL

SEQ ID NO: 2689 - protein, 43 aa, Artificial Sequence
  Synthetic
IHVHVGNVTYTFSSPEQAKEFAKKMAEKLGRQVEVHGEHVRVE

SEQ ID NO: 2690 - protein, 43 aa, Artificial Sequence
  Synthetic
KTVKFDGLQFDFDNPEKALKFALEVAKQKGAEVHIHGDEIKIE

SEQ ID NO: 2691 - protein, 40 aa, Artificial Sequence
  Synthetic
SMTITVDGTELAEKLYKEMLAQNLEVHIRVENGQWVLHIS

SEQ ID NO: 2692 - protein, 43 aa, Artificial Sequence
  Synthetic
TEIIFNGHTRTAPSDDAAYKIAKKIAQKLGLTVRIKNGTVTVT

SEQ ID NO: 2693 - protein, 43 aa, Artificial Sequence
  Synthetic
REEDARRELKQAIREGNEDKVKNLAKKYGVDPDEVEKLKKEAG

SEQ ID NO: 2694 - protein, 43 aa, Artificial Sequence
  Synthetic
PEEKKIVKEALKKANGNKEKAEEIAQKLGLDKEKVRRVLKELG

SEQ ID NO: 2695 - protein, 40 aa, Artificial Sequence
  Synthetic
TQEYTVTDRREAERLRKWAEDQGGRVTVRKENGRWHVHVD

SEQ ID NO: 2696 - protein, 43 aa, Artificial Sequence
  Synthetic
KTVDVQGVEYTFPNPEEAKKFAKKVAEELGLKVEIHGDRIEMH

SEQ ID NO: 2697 - protein, 43 aa, Artificial Sequence
  Synthetic
QTVHMGNYTWHFPNPEEAEKFAKELAEKLNGTIEYHGDTLTVK

SEQ ID NO: 2698 - protein, 43 aa, Artificial Sequence
  Synthetic
DERVDRIVEELQRQGVSPEQIKQYLERQNVDPRIIEKVERKLS

SEQ ID NO: 2699 - protein, 43 aa, Artificial Sequence
  Synthetic
NDEAKKEAEKLWKNNKSEDEIKERLERAGISPDEAEQWLQELR

SEQ ID NO: 2700 - protein, 40 aa, Artificial Sequence
  Synthetic
RQTYEVHGTEAAIRIARELKKQNLKVEIKVHGDKYILHAE

SEQ ID NO: 2701 - protein, 43 aa, Artificial Sequence
  Synthetic
PQKLKELARKVVEGKTSKEEAERRADKLGLDRSELERIIRKLT

SEQ ID NO: 2702 - protein, 43 aa, Artificial Sequence
  Synthetic
QTVKVGDVNVTFDNPEKAKKYAEKVAKKLNGKVTLDGNTYHVE

SEQ ID NO: 2703 - protein, 43 aa, Artificial Sequence
  Synthetic
MEVTVNGVTYKFTNPEQAERFAKEMAKKQNRRLELHGNRWRVE

SEQ ID NO: 2704 - protein, 40 aa, Artificial Sequence
  Synthetic
DWNITVHGDEAAKKVEKMLRDRNLDVKIEKHGNQIILRAS

SEQ ID NO: 2705 - protein, 43 aa, Artificial Sequence
  Synthetic
TTVKVGNTTYTFDNPEKAKKFALEIAKKANGTLKKHNGTFQVN

SEQ ID NO: 2706 - protein, 43 aa, Artificial Sequence
  Synthetic
DEEIKKQAEKLKRNGVSIDEITEILKQRGVSDEQLRKVRRAVK

SEQ ID NO: 2707 - protein, 40 aa, Artificial Sequence
  Synthetic
SVTFTTDGEEQAKRVVEWAKKHNLEAKIEIHNGKYIIHAD

SEQ ID NO: 2708 - protein, 40 aa, Artificial Sequence
  Synthetic
QIHITVEGEEQAREVEKLAKKLNLEVHIEVHNGRYVITLD

SEQ ID NO: 2709 - protein, 43 aa, Artificial Sequence
  Synthetic
GTVHVNGKKYTFPTPEAAEEFAKKAAKKVGTTVEKKNGEFHVK

SEQ ID NO: 2710 - protein, 40 aa, Artificial Sequence
  Synthetic
SIEIHVTGQEKAKKVVEMLKKRNYDVKYEIHGDQVIIQAD

SEQ ID NO: 2711 - protein, 43 aa, Artificial Sequence
  Synthetic
ATVHVDGVQYDFENPEKAYKFAVKMARSKGGTYEIHGNTWKVK

SEQ ID NO: 2712 - protein, 43 aa, Artificial Sequence
  Synthetic
QDLAQKLLEEAAKKNITYTVNGKTYPAGSDDLKKWLEKYAKKV

SEQ ID NO: 2713 - protein, 40 aa, Artificial Sequence
  Synthetic
RETYTVEGEEALRKWMKMLKDRNLEAEVQVHNNKWVIHID

SEQ ID NO: 2714 - protein, 40 aa, Artificial Sequence
  Synthetic
RITVTVDGEENARKKAQELKNKNLDVKIERRGDKWVLHAD

SEQ ID NO: 2715 - protein, 43 aa, Artificial Sequence
  Synthetic
ATVHINGVQYHFSSPEQAKEFAEKVARKQNLRLEVHNGTFHVE

SEQ ID NO: 2716 - protein, 40 aa, Artificial Sequence
  Synthetic
SWTWTFDGEEQAKKMYEIAARQNLDVKVTQENGKWVVHAE

SEQ ID NO: 2717 - protein, 43 aa, Artificial Sequence
  Synthetic
MTIHVNGVQYDFDNPEEAKKFLKEMAKKLGRTYELHNGTVHME

SEQ ID NO: 2718 - protein, 43 aa, Artificial Sequence
  Synthetic
PEDVWRIIWQAIQNGVREIHVNGQTFKADNPEVREEAKKAANK

SEQ ID NO: 2719 - protein, 40 aa, Artificial Sequence
  Synthetic
TQRFTADDEREARRIAEEAKRNGYEVRLRQDNGTWFVEVH

SEQ ID NO: 2720 - protein, 43 aa, Artificial Sequence
  Synthetic
KTVHVGDLTYHFENPEEAKEFAKRMAKKLNLTVEIHGDTIRVE

SEQ ID NO: 2721 - protein, 43 aa, Artificial Sequence
  Synthetic
AQVDVNNVTYHFDNPEEAKEFAKKVAEKLGLQMKYKDGRFQME

SEQ ID NO: 2722 - protein, 40 aa, Artificial Sequence
  Synthetic
RITVRVRGDEQMKHAVKVMKAMNLEVHVEQRGDEYVITAE

SEQ ID NO: 2723 - protein, 43 aa, Artificial Sequence
  Synthetic
GTVKFNGQTYHFDDETQVEKFVKKVASELNLRVERHGDEWQLH

SEQ ID NO: 2724 - protein, 43 aa, Artificial Sequence
  Synthetic
TTVKVNGETYHFDSADKAKKWAEKVAKKLGLDVRQHGNTFQIH

SEQ ID NO: 2725 - protein, 43 aa, Artificial Sequence
  Synthetic
DDQAEKEAKKLKKKGYSPKEAKEELKKLGASEDEAQKIVDRAF

SEQ ID NO: 2726 - protein, 43 aa, Artificial Sequence
  Synthetic
SEDEKKTRQLAKEFNVSPDTVKEALDRANGNEDKAREILQKIV

SEQ ID NO: 2727 - protein, 40 aa, Artificial Sequence
  Synthetic
SQRYEFDGEEKARRAMKELKKQNLDVKITKENGKYIVQAD

SEQ ID NO: 2728 - protein, 43 aa, Artificial Sequence
  Synthetic
SKSEYKEKAEKAFRSGNEDKARQILEDAGLSTDQAEEIIRRIK

SEQ ID NO: 2729 - protein, 43 aa, Artificial Sequence
  Synthetic
TTVIYNGKKVTFNSPEEAKKYAEEVAKKLNATVHIENGTFKVT

SEQ ID NO: 2730 - protein, 40 aa, Artificial Sequence
  Synthetic
RWEITVTGEEAAKKVVKDLRAKNLEVHVEVRGDEFIITAD

SEQ ID NO: 2731 - protein, 43 aa, Artificial Sequence
  Synthetic
DDRAKKIVEKLIRNGVDPDQIKEIAKRQGVDEELAERLIKKIM

SEQ ID NO: 2732 - protein, 40 aa, Artificial Sequence
  Synthetic
TTEYTVTDEQKAREIARELKERGLTVTVEKRNGTFHIRVD

SEQ ID NO: 2733 - protein, 43 aa, Artificial Sequence
  Synthetic
AQVTVNGVKYKFDKPEQVKKFAAEVAKKLNLTIEMKNGDFEVT

SEQ ID NO: 2734 - protein, 43 aa, Artificial Sequence
  Synthetic
KTVTIGDTTYTFDNPEAAEKWAKQLAKENNLTVTQDGNQFKIT

SEQ ID NO: 2735 - protein, 40 aa, Artificial Sequence
  Synthetic
GETYTYDGEEKARRAVKKLKKQNLKVELHVENGKWIVTAE

SEQ ID NO: 2736 - protein, 43 aa, Artificial Sequence
  Synthetic
TQVIVNGTTYQADNTDWIREYAKKLAKKANLTVHIHGNTVTLK

SEQ ID NO: 2737 - protein, 43 aa, Artificial Sequence
  Synthetic
SKAEELIKEAIKRANGDEEQVRQIAEKLGVDPEQVREALERVK

SEQ ID NO: 2738 - protein, 43 aa, Artificial Sequence
  Synthetic
SETEAAKKLEEALRKQTTVTVNGETFNTTEEVRKALEKYKKKY

SEQ ID NO: 2739 - protein, 43 aa, Artificial Sequence
  Synthetic
SPKAQEIAERLKKNGYSIEEIRKILKKLGVSPDEIDEASKYLK

SEQ ID NO: 2740 - protein, 40 aa, Artificial Sequence
  Synthetic
STTITVEGEEKAKRVYKMLAKQNLDVKIRTENGKYIITAS

SEQ ID NO: 2741 - protein, 43 aa, Artificial Sequence
  Synthetic
SQEELRKRAREAVKRGQKITLKGIEVTTEEEADRAADELYREL

SEQ ID NO: 2742 - protein, 40 aa, Artificial Sequence
  Synthetic
TVTLTVTDEREARRLKKEWEKKGYTVTVRKENGTLELRSG

SEQ ID NO: 2743 - protein, 40 aa, Artificial Sequence
  Synthetic
SIHYTKEGDEQMKKMVEELKRRNLRFEYHVEGGQWIIQVD

SEQ ID NO: 2744 - protein, 40 aa, Artificial Sequence
  Synthetic
KVTYHVPNEEFARKLYKKAVDANLNVEIRVENGQFIIHIE

SEQ ID NO: 2745 - protein, 40 aa, Artificial Sequence
  Synthetic
DITYTVEGTEKARRVLKEMRDRNLDAKIEVHNGRWIIHVR

SEQ ID NO: 2746 - protein, 40 aa, Artificial Sequence
  Synthetic
RITIRVHGEEQARKVKKKMEKQNLEVHVERHGDDYVIHAE

SEQ ID NO: 2747 - protein, 40 aa, Artificial Sequence
  Synthetic
SWTFHVHGEEQMKAVIEWAKKNNLEVHWQQHGDQIVIHVE

SEQ ID NO: 2748 - protein, 43 aa, Artificial Sequence
  Synthetic
TDELTDQARKLKENGVDPRQVEEILRRQGVSDEEIKKIKERVV

SEQ ID NO: 2749 - protein, 40 aa, Artificial Sequence
  Synthetic
QLHMTVEGPEQMEKAIRWARAHNLEVHYEIHNGRIIVEVS

SEQ ID NO: 2750 - protein, 43 aa, Artificial Sequence
  Synthetic
DKAEEALKLWQAGQKVTFTLNGTDYTLEPGDEEAYKKIKKQVD

SEQ ID NO: 2751 - protein, 40 aa, Artificial Sequence
  Synthetic
SIRIEVDGEEIADRLRKMLAKMNLDVKVEQHNGKWIVEAS

SEQ ID NO: 2752 - protein, 43 aa, Artificial Sequence
  Synthetic
LTVHVQGVEYRFPSPEEAKEFAEKVAKSLGLRVEFHGNTIHIE

SEQ ID NO: 2753 - protein, 43 aa, Artificial Sequence [sequence omitted]

SEQ ID NO: 2754 - protein, 43 aa, Artificial Sequence
  Synthetic
EDRLKRVVEKLLKNGVSEEEITKILQKLGASDEQVERVIRDVL

SEQ ID NO: 2755 - protein, 43 aa, Artificial Sequence
  Synthetic
QTVKINGQKYDYDTPEKAEKAAKKIAKKYNLTVEVHGDTVQVH

SEQ ID NO: 2756 - protein, 43 aa, Artificial Sequence
  Synthetic
SEVTERAKKLFEKLGNDWKAVEKILRKLGVSESQIEKAKRNIT

SEQ ID NO: 2757 - protein, 43 aa, Artificial Sequence
  Synthetic
QTVKVGNTTYHFPNPQAAIDFAEKLAKKLGGTFEVHGDTVQVR

SEQ ID NO: 2758 - protein, 43 aa, Artificial Sequence
  Synthetic
PDELEKIARELNKRGYSNDEAAEILKKLGANPEKVKEVRRRLN

SEQ ID NO: 2759 - protein, 43 aa, Artificial Sequence
  Synthetic
DEKAERIVRDLQKKGVSPEEVLKILRDSGVDPRKVEEVERKLK

SEQ ID NO: 2760 - protein, 43 aa, Artificial Sequence
  Synthetic
GTVKVNGQKFTFPSTKLAREFAKKIAKKAGLTLHIDGNTITVT

SEQ ID NO: 2761 - protein, 43 aa, Artificial Sequence
  Synthetic
QKVEVGNTTYKFPNPEKAKKFAEKAAKKYNLTVEVHGNTVKVH

SEQ ID NO: 2762 - protein, 43 aa, Artificial Sequence
  Synthetic
TTVQVNGQKFQADTKDAAVKLAKKFAKEYNLKVYVHGPTVQVE

SEQ ID NO: 2763 - protein, 43 aa, Artificial Sequence
  Synthetic
TTVHVNNLTYHFDNPEQAEKFAKEMAKKAGLKLELHGNTWHIE

SEQ ID NO: 2764 - protein, 43 aa, Artificial Sequence
  Synthetic
LTIKVDNVTYHFDNPEEALKMALKIAKSKGLQVHYKDGTFNIE

SEQ ID NO: 2765 - protein, 40 aa, Artificial Sequence
  Synthetic
EFEIKVRGKEQADKVKEEMERRNLDVKVEKHGDHYIVKVS

SEQ ID NO: 2766 - protein, 43 aa, Artificial Sequence
  Synthetic
DERVEKIVKRLLDNGVSPEEVTKHLKDNGVDEREVRKVIREVI

SEQ ID NO: 2767 - protein, 43 aa, Artificial Sequence
  Synthetic
PTEEILKKIKKALENNDDDTLEELARRANVSREEAKRLVEKLG

SEQ ID NO: 2768 - protein, 43 aa, Artificial Sequence
  Synthetic
KTVKVNGVQYDFNNPEEVKKFADEMAKKLGARVEFHGDTVHIE

SEQ ID NO: 2769 - protein, 43 aa, Artificial Sequence
  Synthetic
DERVTDIVRRLLDNGVDDRQVERILKKQGVDPREIEKAKRRVK

SEQ ID NO: 2770 - protein, 43 aa, Artificial Sequence
  Synthetic
QTIHVSNYTYKYDNPEKAKKIAKKLAEKYNLKVTVDGDTIKVE

SEQ ID NO: 2771 - protein, 43 aa, Artificial Sequence
  Synthetic
RDEAEKRFKELLKNGYSPDEAEEIARREGWDPESIERAKKKAL

SEQ ID NO: 2772 - protein, 43 aa, Artificial Sequence
  Synthetic
GTVEFNGTTYHFSDDEKVKKFVKEVAKKLGLQVHQDGNKWTLK

SEQ ID NO: 2773 - protein, 43 aa, Artificial Sequence
  Synthetic
AQVHVNGVTIEFDNPEEAEKYAKEMAKKLGLTVEVHGEQFKVE

SEQ ID NO: 2774 - protein, 43 aa, Artificial Sequence
  Synthetic
TTVHVNGVTYHFPNPEEAYKFAVKVARESGRTYEVKGDQIDVE

SEQ ID NO: 2775 - protein, 43 aa, Artificial Sequence
  Synthetic
SEQEKKEEFKRAIREGNEDEAEKIARKANISEEEEKKLRKEAS

SEQ ID NO: 2776 - protein, 43 aa, Artificial Sequence
  Synthetic
RREEAKKKAEKLVRSGNPDEAKKVLEKAGISPEEAERIIKKVK

SEQ ID NO: 2777 - protein, 43 aa, Artificial Sequence
  Synthetic
SEKEKQIKRLAREANVDEEIVRRLLDNGVSDEEIKDRARKIYL

SEQ ID NO: 2778 - protein, 43 aa, Artificial Sequence
  Synthetic
SEEEKKEKYARLAGVSRETLEKIRRTLGVSIEQAARYAQKQQS

SEQ ID NO: 2779 - protein, 43 aa, Artificial Sequence
  Synthetic
KTVQFNGYEYHFDNPEEAKKFAKEMAERAGGEVRLHGDTIQIR

SEQ ID NO: 2780 - protein, 40 aa, Artificial Sequence
  Synthetic
GITYTFDGPEKALEFVKAMKKQNLKVEYQIHGDRVIIQVD

SEQ ID NO: 2781 - protein, 40 aa, Artificial Sequence
  Synthetic
EIEIETHGEEQVKKVKKEAEAKNLEVHVEKHGDKYILRLR

SEQ ID NO: 2782 - protein, 43 aa, Artificial Sequence
  Synthetic
ATVHVNGVQYHFKTPEEARKFAEKMAKTYQLRLEVHGDTIHVE

SEQ ID NO: 2783 - protein, 43 aa, Artificial Sequence
  Synthetic
GTVKVGDKTYTFPNPEEAEEFAKKAAKKLNLTVHKHGNKFTLK

SEQ ID NO: 2784 - protein, 43 aa, Artificial Sequence
  Synthetic
NEEVKRIVEELKRKGVDKEQIIDILKKQGVSDEELKEAKKVVG

SEQ ID NO: 2785 - protein, 40 aa, Artificial Sequence
  Synthetic
EINITTEGEEQARKVEEEAKKKNLKVELKVENGKWIITLK

SEQ ID NO: 2786 - protein, 43 aa, Artificial Sequence
  Synthetic
RTVHVGNVTYHFDEPEQVKKFVERVAKELNLQVHWDGDEVRIE

SEQ ID NO: 2787 - protein, 43 aa, Artificial Sequence
  Synthetic
DDKKKEIDKIARELNVSIEELLEIARRRGDEELVRKVQKVLEK

SEQ ID NO: 2788 - protein, 43 aa, Artificial Sequence
  Synthetic
NDKAEEIAERLKRNGQSKDRIEKELRREGVSEEEIKKALEKAG

SEQ ID NO: 2789 - protein, 43 aa, Artificial Sequence
  Synthetic
TTVTINGVEYHFDNPEQAEKFADEMAKKLGLKLTVHGDRFRVE

SEQ ID NO: 2790 - protein, 40 aa, Artificial Sequence
  Synthetic
QVHYTVHGEEQAKRLAKKLKKQNLRVEIHVHGDRIILQAD

SEQ ID NO: 2791 - protein, 40 aa, Artificial Sequence
  Synthetic
RITMTLHGPEQMKKQIEWAKRQNLEIHVHVHGDQIIVHID

SEQ ID NO: 2792 - protein, 43 aa, Artificial Sequence
  Synthetic
TQEEAKKRAEKLYRNGNPEKAERLLEKAGVDPDEKEEIKRRAD

SEQ ID NO: 2793 - protein, 43 aa, Artificial Sequence
  Synthetic
PPKWKKIAIKLLRNGITQLTFNNITVTVTTEEEAKKAAKIAAN

SEQ ID NO: 2794 - protein, 40 aa, Artificial Sequence
  Synthetic
EFTITVEGEEQAKKVVEMAKRRNLSVRIEHHNGRIIITAS

SEQ ID NO: 2795 - protein, 43 aa, Artificial Sequence
  Synthetic
TEVHIDGVTYHFSNPEEAKKFALKLAKTKNLEIHIDGDHIEVR

SEQ ID NO: 2796 - protein, 43 aa, Artificial Sequence
  Synthetic
PTDQLKKEAEKAWRNGNRDKARELAKRAGLSDDQADQFVRDLG

SEQ ID NO: 2797 - protein, 43 aa, Artificial Sequence
  Synthetic
RPEAREIAQQLFENGVSPEEIRKILEKAGVDPEEARQIAEEVA

SEQ ID NO: 2798 - protein, 43 aa, Artificial Sequence
  Synthetic
PEELEKRVEDLLRQGVSEEQVVEILKKLGVDEDQARKIVKKVS

SEQ ID NO: 2799 - protein, 43 aa, Artificial Sequence
  Synthetic
QEQEAQERVRKALQEGDTDKAREIARRAGYSDEWAERLRKKLF

SEQ ID NO: 2800 - protein, 40 aa, Artificial Sequence
  Synthetic
TTFYKFDSKDAAKKAAEEFKKKGKDVTVTKLNGTWVVEEN

SEQ ID NO: 2801 - protein, 43 aa, Artificial Sequence
  Synthetic
QKLEEIAKRLYKERPGDEDYIREALKKLGVSEEEAKRLAKKAT

SEQ ID NO: 2802 - protein, 43 aa, Artificial Sequence
  Synthetic
ATVTINGVTYHFDEPEQVKKWAEEVAKKLGLQVEYHGDTVHVE

SEQ ID NO: 2803 - protein, 43 aa, Artificial Sequence
  Synthetic
SDKEKSIKEIAKRLGISKDEAKRLLDEANGNEEKAERLWKKEQ

SEQ ID NO: 2804 - protein, 43 aa, Artificial Sequence
  Synthetic
TTVHVNGKEYTFPTAELAEEFARKAAKKLNLQLTVSGNTVEVH

SEQ ID NO: 2805 - protein, 43 aa, Artificial Sequence
  Synthetic
SEKARKIAEKLKKKGVSPDEIKEILERNGVTPDEAEQLARELK

SEQ ID NO: 2806 - protein, 40 aa, Artificial Sequence
  Synthetic
TKETTVTDETTARELAKELKKKGKRVDVQRENNTWTVRWD

SEQ ID NO: 2807 - protein, 43 aa, Artificial Sequence
  Synthetic
DEKKLKEEVEKAIKDGDEDRVRKILQELGISDEQVQKIIERIK

SEQ ID NO: 2808 - protein, 43 aa, Artificial Sequence
  Synthetic
TQFTFNGQTVTAPTTDAAAKLAKKLAKEYNLTVEVHNGKVKVT

SEQ ID NO: 2809 - protein, 43 aa, Artificial Sequence
  Synthetic
TIKDLIKLAEWAIKKNTSLTIGDYTVTTAEQAKKVAEILKKEL

SEQ ID NO: 2810 - protein, 43 aa, Artificial Sequence
  Synthetic
DEELKERVDRLRKNGVSKDEIKEILERLNVSEEEIRKIQREVF

SEQ ID NO: 2811 - protein, 43 aa, Artificial Sequence
  Synthetic
LQRAEEALKEAQKKNLSPEELKRLLEKAGASPELIRQALERLK

SEQ ID NO: 2812 - protein, 40 aa, Artificial Sequence
  Synthetic
TTTLEFTDKREAERAARELAKRGQDVTVTKKNGKFFVKQN

SEQ ID NO: 2813 - protein, 43 aa, Artificial Sequence
  Synthetic
TQKEAKLLLKAFHAGQPFTFNGTTFPAGSDDAKKAYKIAQKVV

SEQ ID NO: 2814 - protein, 43 aa, Artificial Sequence
  Synthetic
TTVHVNGQEYNFNDPREVEKFVKTVVKRLNVTVETKDGTWHVS

SEQ ID NO: 2815 - protein, 43 aa, Artificial Sequence
  Synthetic
GQVKVNGTTYQFPTTDQAKEFAKKAAKKAGLTVTVHGDTVQVH

SEQ ID NO: 2816 - protein, 43 aa, Artificial Sequence
  Synthetic
QTVKFNGQKITFPTPEEAKKYAKKLAKKYNLELEIHGPNITLH

SEQ ID NO: 2817 - protein, 43 aa, Artificial Sequence
  Synthetic
LEKAKKIVERLLRQGVSDEEVEKILKRAGVDDKEVERVQKELK

SEQ ID NO: 2818 - protein, 43 aa, Artificial Sequence
  Synthetic
SDEVRKLVKDLLDQGIDPDEVKKILKKQGVDEKEIEELLKQLS

SEQ ID NO: 2819 - protein, 43 aa, Artificial Sequence
  Synthetic
QKVTVNGETYHFDTEEKAQRWAKKLAKKLNLTLTQTNGSIQLH

SEQ ID NO: 2820 - protein, 40 aa, Artificial Sequence
  Synthetic
EEHYRVTGDEAMKKIVKMAKKRNLEVEVHKHGDDWIITVR

SEQ ID NO: 2821 - protein, 43 aa, Artificial Sequence
  Synthetic
TQVTVGNTTYTFDNPEKAKKFAQKAAEKNGLELHIDGPQITVK

SEQ ID NO: 2822 - protein, 43 aa, Artificial Sequence
  Synthetic
RKEEEDRKREELRKQGNKDELRRWLQEQGVSEDEAREIAEKLG

SEQ ID NO: 2823 - protein, 40 aa, Artificial Sequence
  Synthetic
SFHITVHGEEKARAVQEWAKKQNLEAHVHIHGDRIIVEIH

SEQ ID NO: 2824 - protein, 43 aa, Artificial Sequence
  Synthetic
TTVEVNGKKFTFPSTDAAKQFALEAAKKLGLTLEVHGNTLKLE

SEQ ID NO: 2825 - protein, 43 aa, Artificial Sequence
  Synthetic
HQVHVNGYTYHFDNPEQVWKFAKEMAERLNLQLTVHGETLEVH

SEQ ID NO: 2826 - protein, 43 aa, Artificial Sequence
  Synthetic
DEERLKEEIEKAQRNNDAERVKKLLERLGVDPREVEEVYQRLS

SEQ ID NO: 2827 - protein, 40 aa, Artificial Sequence
  Synthetic
TTFIKVTKEEEAKKLAKELQKNGIPAQVTQINGTWFVKKQ

SEQ ID NO: 2828 - protein, 40 aa, Artificial Sequence
  Synthetic
EIQYETHGEEQMRRVMEKLQKANLEYEVRIHGDRVVIHVK

SEQ ID NO: 2829 - protein, 43 aa, Artificial Sequence
  Synthetic
PDEIKKILKELLDRGVSPEQVKKIAKRQGIDEETVQRLLEEVK

SEQ ID NO: 2830 - protein, 43 aa, Artificial Sequence
  Synthetic
VTVHVGNYTFHFDNPEEAKEFVDKWAKTYQRRVEVHNGTYHIE

SEQ ID NO: 2831 - protein, 43 aa, Artificial Sequence
  Synthetic
GTVEVGDIELHYDTPEEAEKAAQKIAKKLNGTVTKHNGTFKVE

SEQ ID NO: 2832 - protein, 40 aa, Artificial Sequence
  Synthetic
QMTFTMEGPEQAKKMIEEMRRRNLEVHIDVRNGRWILHAR

SEQ ID NO: 2833 - protein, 43 aa, Artificial Sequence
  Synthetic
NREAYERLREAYEKGQPVTINGNTFEPGSDEWKRAYEEARKEA

SEQ ID NO: 2834 - protein, 43 aa, Artificial Sequence
  Synthetic
SEEAKKIAEELIRRGKSDDEIREILKRLGVDEEEARRAIEEVN

SEQ ID NO: 2835 - protein, 40 aa, Artificial Sequence
  Synthetic
SFTIRFDGPEKAIKFYKEMAKRNLEVHIEIHGDKAEVTVK

SEQ ID NO: 2836 - protein, 43 aa, Artificial Sequence
  Synthetic
TKIAKWAKWAAKKGKPVTVTWNGITITITTQKEAKEAIEKANN

SEQ ID NO: 2837 - protein, 40 aa, Artificial Sequence
  Synthetic
RETYTFDGEELARRQAEKAKKRNLSFEIQIHNGKYVITIE

SEQ ID NO: 2838 - protein, 40 aa, Artificial Sequence
  Synthetic
KETVTVEGPEKADKFRKEMEKRNLRARIEVHGDHVVIHIE

SEQ ID NO: 2839 - protein, 43 aa, Artificial Sequence
  Synthetic
KQINVGNTTYHIPSLEKAQQLAQKLAKKLGLTLKVKNGTVELH

SEQ ID NO: 2840 - protein, 43 aa, Artificial Sequence
  Synthetic
PEEAKKFIEKLKREGKSLDEIREIAERNGNREAAELAEKLLRG

SEQ ID NO: 2841 - protein, 43 aa, Artificial Sequence
  Synthetic
DEKIKELVEKLLKNGVDREQIKKQAKEQGLDPREVDKVIKKIS

SEQ ID NO: 2842 - protein, 43 aa, Artificial Sequence
  Synthetic
NKVTIGNTTYKFPSWKLAYKYALEVAKKKGLEIQVHGNQVKVH

SEQ ID NO: 2843 - protein, 43 aa, Artificial Sequence
  Synthetic
TPDEAKKEAQKALDQGNEEKAIRILQSAGVTPDKAQQIVEELR

SEQ ID NO: 2844 - protein, 43 aa, Artificial Sequence
  Synthetic
DEREVKKKVKEVVERGDEDRAKKILKDAGISDEEVKDIIRKLK

SEQ ID NO: 2845 - protein, 40 aa, Artificial Sequence
  Synthetic
RETITVDGEEKARRIYKEMADRNLKVKIEQHNGQWHITVE

SEQ ID NO: 2846 - protein, 43 aa, Artificial Sequence
  Synthetic
STVEVNGTKYTFPTPEKAKQFAKKVAKKQNLKIEVHGTKITLH

SEQ ID NO: 2847 - protein, 43 aa, Artificial Sequence
  Synthetic
SDTTKKLKRKLEKAGYSPEEAERIVRNAGNDPNQVKEILKQAL

SEQ ID NO: 2848 - protein, 43 aa, Artificial Sequence
  Synthetic
NEKDKRIRKAAEILGVDEDQFRKIAQKLGRDESELAEEVERRG

SEQ ID NO: 2849 - protein, 43 aa, Artificial Sequence
  Synthetic
DKDRAKELVEEAIRNGDEDKAKEVLKRAGVSDEEVKEIIKRLM

SEQ ID NO: 2850 - protein, 43 aa, Artificial Sequence
  Synthetic
KEEVEKIVRRVQRRGLDERQVRKELKENGVSDEEIEKIIRLLL

SEQ ID NO: 2851 - protein, 43 aa, Artificial Sequence
  Synthetic
TELEELWKEALRQANGDKDRVKEILKRLGVDPRQVEKVARKLS

SEQ ID NO: 2852 - protein, 43 aa, Artificial Sequence
  Synthetic
LEVHVNGVTYHFSSPEQAKKFAEKIAKELQLQVHVEGNTIRVE

SEQ ID NO: 2853 - protein, 43 aa, Artificial Sequence
  Synthetic
KTVHVNGVTYHFDNPEEMKKFVEKMAKKLNRTVEYHGDTVKIE

SEQ ID NO: 2854 - protein, 43 aa, Artificial Sequence
  Synthetic
QDKEEEIAWRAVQEGRDVTVGNKTFSPSDEKVRELAKRFQNRQ

SEQ ID NO: 2855 - protein, 43 aa, Artificial Sequence
  Synthetic
PEDLKKAAEKAKKGITITVTVNGVKIKITSPEAAQYAIDLAKK

SEQ ID NO: 2856 - protein, 40 aa, Artificial Sequence
  Synthetic
KLTWRVHGEEQMKKVLELAKRQNLEVHVRIENGQFVLEAE

SEQ ID NO: 2857 - protein, 43 aa, Artificial Sequence
  Synthetic
STVEYGDTTYTAPTLDEAKKIAQKLAKENNVTYTVDGNKVTVH

SEQ ID NO: 2858 - protein, 43 aa, Artificial Sequence
  Synthetic
PEDAKKVAEELKRRGVSWKEISKELQKLGVSKEEIKKFEKKAI

SEQ ID NO: 2859 - protein, 43 aa, Artificial Sequence
  Synthetic
NPEEAKRLAEEALRNGNEDEARKILEKANLSPDEVEQILQELG

SEQ ID NO: 2860 - protein, 40 aa, Artificial Sequence
  Synthetic
GMTWEVHGEEQARKLEEELRRRNLEVEIQHHGDKIVITAH

SEQ ID NO: 2861 - protein, 41 aa, Artificial Sequence
  Synthetic
HTVTLNGKTFTFNTEEEARRFAKKAGAKKVETDGTTVRLQG

SEQ ID NO: 2862 - protein, 43 aa, Artificial Sequence
  Synthetic
SEEEAERKARKLAKEGNTDKARELLKRAGVSKEKIDRISKEYG

SEQ ID NO: 2863 - protein, 43 aa, Artificial Sequence
  Synthetic
SEEVKKIVKELLDRGIDPRQVEEILKRQGVDEKEVKDAVREVG

SEQ ID NO: 2864 - protein, 43 aa, Artificial Sequence
  Synthetic
PEEVEEVVKELKKQGLSDDQIREVLKKLGVDDREVEEAIQKVK

SEQ ID NO: 2865 - protein, 43 aa, Artificial Sequence
  Synthetic
TQVNIGDTTYTFPSPKAAQEAAKKLAKKYNLTVHISGNTVTIK

SEQ ID NO: 2866 - protein, 43 aa, Artificial Sequence
  Synthetic
PIDELAKEAEERLRRGETVTLAGVTVTSKDDLDKAVEEYKKLV

SEQ ID NO: 2867 - protein, 43 aa, Artificial Sequence
  Synthetic
PKEKEKEKAKKALKEGNKDKARQILKDLGLDEDQAREFEKRVL

SEQ ID NO: 2868 - protein, 43 aa, Artificial Sequence
  Synthetic
KTVQFDGLEYHFDNPEQAKKFAAEVAKKKGGTVEIHGETIQIK

SEQ ID NO: 2869 - protein, 43 aa, Artificial Sequence
  Synthetic
ATVHLNGLTYTFPNPEQAKKFAEKVARELGLQVEVHGNTLHVE

SEQ ID NO: 2870 - protein, 40 aa, Artificial Sequence
  Synthetic
KITIETHGEEQARRAAEKMKRVNLDAQIEVHNGKWIVHAE

SEQ ID NO: 2871 - protein, 40 aa, Artificial Sequence
  Synthetic
ERRETYDDEENARRAAEEWRKRGKTVRLEEHGGTFTVRVR

SEQ ID NO: 2872 - protein, 43 aa, Artificial Sequence
  Synthetic
TNDEKEKEAKKAWKEGNREKAKEILKKAGYSEEEAERIARKLG

SEQ ID NO: 2873 - protein, 40 aa, Artificial Sequence
  Synthetic
QIKFETHGPEAAKKIIEEMKRRNLEVHVTVHNGKFVIRAE

SEQ ID NO: 2874 - protein, 43 aa, Artificial Sequence
  Synthetic
HTVYVGDETYHFDNPEEVEKFVKKVAKELNLQVEDHNGHFHLK

SEQ ID NO: 2875 - protein, 40 aa, Artificial Sequence
  Synthetic
TIKITFDDEREARKAATEAKKNGKDVQITEDNGQYTVEIR

SEQ ID NO: 2876 - protein, 43 aa, Artificial Sequence
  Synthetic
VTVHVGNTTYHFDSPEEADDFAKKIAKKLGLQIQHHGNTIRIE

SEQ ID NO: 2877 - protein, 43 aa, Artificial Sequence
  Synthetic
HTVQIGNTTYQATTPEQAQKIAEKLAKKNNLTVKKDGNFWKVE

SEQ ID NO: 2878 - protein, 40 aa, Artificial Sequence
  Synthetic
GWRWQVHGEEQAKRIYKMAAKMNLDVKVEVHGDDIIIQAD

SEQ ID NO: 2879 - protein, 43 aa, Artificial Sequence
  Synthetic
SQEELAKKALKAAEKGQPITINGVEITTPDQAQKFAEKLLKKI

SEQ ID NO: 2880 - protein, 40 aa, Artificial Sequence
  Synthetic
KVTYEFNGEEQAKRFMEKMRKHNLKAEIRIENGKAVVTVE

SEQ ID NO: 2881 - protein, 43 aa, Artificial Sequence
  Synthetic
PKDDARELARKLADSGNKDRARDELRRLGYSDEEAERILQEAT

SEQ ID NO: 2882 - protein, 43 aa, Artificial Sequence
  Synthetic
STLHVGNTTYHFPSLDAAKEFAEKLAKKNNLTVHVSGNTVTVK

SEQ ID NO: 2883 - protein, 40 aa, Artificial Sequence
  Synthetic
EIHVTVDGDEAAKKMIEMAKRRNLEVKVRKENGKIVVTIQ

SEQ ID NO: 2884 - protein, 40 aa, Artificial Sequence
  Synthetic
SLTIESHGEEQARRIAKHLKAHNLEVHIEIHNGKFIITAH

SEQ ID NO: 2885 - protein, 43 aa, Artificial Sequence
  Synthetic
EPRVEKIAKELAKRGVNPEEIKRILQNEGVTPQEAEEALRRAT

SEQ ID NO: 2886 - protein, 40 aa, Artificial Sequence
  Synthetic
EETWEVHGEEQMKAIIEMAKKRNLEVHYEIHGNKIVIHLH

SEQ ID NO: 2887 - protein, 40 aa, Artificial Sequence
  Synthetic
SVHVTFDGEEQAKAFAEEMKKRNLEAHVKVENGKWVVDAS

SEQ ID NO: 2888 - protein, 43 aa, Artificial Sequence
  Synthetic
SEDEKRIAAKYYEEPNNEELKRRIEKLGISPEEIERAWRELQG

SEQ ID NO: 2889 - protein, 43 aa, Artificial Sequence
  Synthetic
GTVHVNGETYKFPNPEKAKKFAEKLAKIYNATVHEKNGKFKVT

SEQ ID NO: 2890 - protein, 40 aa, Artificial Sequence
  Synthetic
TTRYTVTNPEEAKKVVEELQRRGLTVRWEVRGTTVTIEVD

SEQ ID NO: 2891 - protein, 43 aa, Artificial Sequence
  Synthetic
KKVLVNGQEYEFDTDEEVKKFVEEVVKKLNVTVTEKDGVFHVS

SEQ ID NO: 2892 - protein, 40 aa, Artificial Sequence
  Synthetic
SEKVEFNGPEQAHKFMKEMKKRNLEVHIRVKNGKAVVEIR

SEQ ID NO: 2893 - protein, 43 aa, Artificial Sequence
  Synthetic
TTVNVENYTYHFSNPEEALKFVLKVAKSLGRTYTLHGNTWHIE

SEQ ID NO: 2894 - protein, 40 aa, Artificial Sequence
  Synthetic
KETYEVHGEEQMKKLIKELKKKNLDVKYRVEGNRWIVEAD

SEQ ID NO: 2895 - protein, 43 aa, Artificial Sequence
  Synthetic
TTVKVNGEKYTFPSPEEAQKFAEKAAKKLGLQVTVENGTVVVK

SEQ ID NO: 2896 - protein, 43 aa, Artificial Sequence
  Synthetic
PPEELKRRLKELVDRGQSITINGITVTTREEAERAAEQWRKDL

SEQ ID NO: 2897 - protein, 43 aa, Artificial Sequence
  Synthetic
KQVHVGNVTYDFPNPEEAKKFAKEVAERLGLRVELHNGQIHVE

SEQ ID NO: 2898 - protein, 40 aa, Artificial Sequence
  Synthetic
TQTIEVHTKEAAEKYAQQAKKLGLPVTIQKHNGTWKVHFE

SEQ ID NO: 2899 - protein, 43 aa, Artificial Sequence
  Synthetic
DEDLEEKVKRLLDNGLDKDQVKDILRKQGVDPRQIEEVLKRVG

SEQ ID NO: 2900 - protein, 43 aa, Artificial Sequence
  Synthetic
KTVHVGNVTYHFDNPEEAYKFAQEVAKKLGLQVHYHGDEVHIE

SEQ ID NO: 2901 - protein, 43 aa, Artificial Sequence
  Synthetic
PEDKARELIKKAFENGNEDLARKLAKSLGASPDTVKQILNELR

SEQ ID NO: 2902 - protein, 43 aa, Artificial Sequence
  Synthetic
PEEEIKREVERLFREGNEDRAKELVKKANSDEAKKFFQKLQKA

SEQ ID NO: 2903 - protein, 43 aa, Artificial Sequence
  Synthetic
QTVDVGNVTYHFSNPEEAVKFALKMAKTHNLDIEFHGDKIRVE

SEQ ID NO: 2904 - protein, 43 aa, Artificial Sequence
  Synthetic
ITVHVNGLTFHFNNPEQVKKFLDEMAKTYGLQVKYDNGTYRME

SEQ ID NO: 2905 - protein, 43 aa, Artificial Sequence
  Synthetic
DEKAKRIVERLQKDGVSTEQIKKILKEAGVDPRIVEEIARRIG

SEQ ID NO: 2906 - protein, 43 aa, Artificial Sequence
  Synthetic
SDKLAQLFRDLQEKGYSDDEAREWFKKQGLNADEAEKAARKNG

SEQ ID NO: 2907 - protein, 43 aa, Artificial Sequence
  Synthetic
NWQDILRRAEEENRPIEFHIGDETYHVPPGDEDAAKKIEKILQ

SEQ ID NO: 2908 - protein, 43 aa, Artificial Sequence
  Synthetic
EDREKEIQKAADIRGIDPDQLREEAKRRGEDPEQLARKILKKY

SEQ ID NO: 2909 - protein, 43 aa, Artificial Sequence
  Synthetic
TTLTVNGVDYTFPNPEEAKKWAEKLAKELNLRVEVHNGRFRVE

SEQ ID NO: 2910 - protein, 40 aa, Artificial Sequence
  Synthetic
SFQVHTDGEEDMRRIIEMLKKQNLKVRVEVHNGKWVVQAD

SEQ ID NO: 2911 - protein, 43 aa, Artificial Sequence
  Synthetic
KEEEARRKIEKALRNGNREKARRIAEKAGLSRSEVEKIRKKVF

SEQ ID NO: 2912 - protein, 40 aa, Artificial Sequence
  Synthetic
KITYHTHGEEQAKEVVKWAKAQNLPVEVRREGNRIVIEVD

SEQ ID NO: 2913 - protein, 43 aa, Artificial Sequence
  Synthetic
GTVDWNGKKFTFPNPEEAVKYAQKLAKEAGLTVHVDGKTITVK

SEQ ID NO: 2914 - protein, 43 aa, Artificial Sequence
  Synthetic
TTVHVNGVQYDFSSPEEAKKFVDKVAKSLGLQVEVHNGQFHIK

SEQ ID NO: 2915 - protein, 40 aa, Artificial Sequence
  Synthetic
TTEITVDDETEARRIYEELKKNGYDVRVRQENGTWKIESD

SEQ ID NO: 2916 - protein, 40 aa, Artificial Sequence
  Synthetic
TTKYKITDPKQAKELAKKLRKQGLDVEVHTHGDTITLQVK

SEQ ID NO: 2917 - protein, 40 aa, Artificial Sequence
  Synthetic
TITIRVTDKEEARRVAEEWASKGKTVTVTQTNGTWEIRVD

SEQ ID NO: 2918 - protein, 43 aa, Artificial Sequence
  Synthetic
TQIEVGNTTITLPTQDAAKQLAKELAKKYNLTVHIEGNTIKVT

SEQ ID NO: 2919 - protein, 43 aa, Artificial Sequence
  Synthetic
SLDELREKVKKLVKNGQEVHLGNFTVTSEEDVEKVIETLKKSS

SEQ ID NO: 2920 - protein, 43 aa, Artificial Sequence
  Synthetic
TTVHVNNVTYHFDNPEEAKKFAEKMAKKLNLTLQVKDGTFRVT

SEQ ID NO: 2921 - protein, 40 aa, Artificial Sequence
  Synthetic
RVTYETENEEQMKKLVEWAKRQNLKVEVHQDGDKFIITIE

SEQ ID NO: 2922 - protein, 43 aa, Artificial Sequence
  Synthetic
SYEELAKRLLDKKGITHLDVNGRTFEANDPQALKELAKILKKS

SEQ ID NO: 2923 - protein, 43 aa, Artificial Sequence
  Synthetic
DERVEKIADELRRRGVDKEEVEEILKRQGVDEEEVKRVVDRLI

SEQ ID NO: 2924 - protein, 40 aa, Artificial Sequence
  Synthetic
TETYTYTDEREARKAEEELRRRGRQVEIRKDGTEFEVRSG

SEQ ID NO: 2925 - protein, 43 aa, Artificial Sequence
  Synthetic
KQVHINGVTYHFNNPEEVRKWAEKLARELNLQIEWHGDQVHVE

SEQ ID NO: 2926 - protein, 43 aa, Artificial Sequence
  Synthetic
KTVEVNGVKYDFDNPEQAREMAERIAKSLGLQVRLEGDTFKIE

SEQ ID NO: 2927 - protein, 43 aa, Artificial Sequence
  Synthetic
KTVKVNGVDYTFENPEQAKRFALEVAKKQGLEVQFHGDTIRVE

SEQ ID NO: 2928 - protein, 43 aa, Artificial Sequence
  Synthetic
PESRKRAEELIRRANGNTKEAKRLAEEEGNESVKKAIDEIARG

SEQ ID NO: 2929 - protein, 43 aa, Artificial Sequence
  Synthetic
SQEQLKKEVERAVREGNEEEAEEIAKKAGLSPDQARQLVEEIK

SEQ ID NO: 2930 - protein, 40 aa, Artificial Sequence
  Synthetic
KVTYTVDGEEIARRLVEMAKKRNLEAHVTVENGKWVVTIE

SEQ ID NO: 2931 - protein, 43 aa, Artificial Sequence
  Synthetic
ITVEFNGYQYHFETPEEVKKFAEEVAKKLGLQVQWHGDTVQMH

SEQ ID NO: 2932 - protein, 40 aa, Artificial Sequence
  Synthetic
EVTFKVDGPEQVKKALEKAKRMNLEAEVRIENGKYVIHAR

SEQ ID NO: 2933 - protein, 43 aa, Artificial Sequence
  Synthetic
TEDEYKKRAKKALDNGNSDEARKYLQKAGASPEQQERWLKKAL

SEQ ID NO: 2934 - protein, 43 aa, Artificial Sequence
  Synthetic
DEDLRRIVEEVRRKNLDEEQIEKLARELNVDDRQIEKLKKLVK

SEQ ID NO: 2935 - protein, 40 aa, Artificial Sequence
  Synthetic
TTTITFDDKTLADTYAEEAKRRGKTVRIEQRNGLWTVEVR

SEQ ID NO: 2936 - protein, 43 aa, Artificial Sequence
  Synthetic
TDEKKKEIKKAIKNGVSEDEIKRIAKELGFSEEDAERIIREVA

SEQ ID NO: 2937 - protein, 40 aa, Artificial Sequence
  Synthetic
RLTFRVRGEEQAKKVEKEMRKRNLNVEVQQHGDEYIITAE

SEQ ID NO: 2938 - protein, 43 aa, Artificial Sequence
  Synthetic
NDEVKKQIERLVRNGVDPREIKKHVERLGVSREFADKVIKEVS

SEQ ID NO: 2939 - protein, 40 aa, Artificial Sequence
  Synthetic
RVTYTFEGEEQARRAWQDMADKNLKVEVHQHGNRWKVTVE

SEQ ID NO: 2940 - protein, 43 aa, Artificial Sequence
  Synthetic
STVKFNGKTFTFNSEDAARKFAEKAAKKLNLTVHQKNGNFTLK

SEQ ID NO: 2941 - protein, 43 aa, Artificial Sequence
  Synthetic
GQVNVNGTTYHTDNVDEARKLAKKLAKKYNLTVHIHGTEITVK

SEQ ID NO: 2942 - protein, 43 aa, Artificial Sequence
  Synthetic
DDEARKWVEQVQRRGLSPEQLEELLRKLGFSDEQIKDAKRYLG

SEQ ID NO: 2943 - protein, 43 aa, Artificial Sequence
  Synthetic
REVHMNGITYKFSSPEEVKEFVEKVARSLNLQVEWRGEQVHVE

SEQ ID NO: 2944 - protein, 43 aa, Artificial Sequence
  Synthetic
TKDKAKEIVKRLAENGTPEEATKIARKLGISDQIAQEALEEWK

SEQ ID NO: 2945 - protein, 40 aa, Artificial Sequence
  Synthetic
TTTYTFTQSEQAKKFLKEAQKKGLQVHLYQDGNTYQVTVK

SEQ ID NO: 2946 - protein, 43 aa, Artificial Sequence
  Synthetic
PDEKRKIVKQLLDNGLSPEQARKEAEKAGISEEEARKLINEIL

SEQ ID NO: 2947 - protein, 43 aa, Artificial Sequence
  Synthetic
DEEVKKIFKELLKRGVDKRQVEKELRERGVSEEAIKEVQREWG

SEQ ID NO: 2948 - protein, 43 aa, Artificial Sequence
  Synthetic
DERAEKIVERLKRNNVDPREIEKILKRAGLSDDEVRKVLRKVM

SEQ ID NO: 2949 - protein, 43 aa, Artificial Sequence
  Synthetic
STVILGDTTYTFPTEDAAKKWAEEVAKKLNLTVKQKNGKFKIE

SEQ ID NO: 2950 - protein, 43 aa, Artificial Sequence
  Synthetic
TTVHVGNTTYTYNSTEEAIKVAQELAKKLNLTVRVDGNTIKVE

SEQ ID NO: 2951 - protein, 40 aa, Artificial Sequence
  Synthetic
SIRYHMEGEEAVKKLIEHARRQNLRYEVQIHNGQYIIDVD

SEQ ID NO: 2952 - protein, 43 aa, Artificial Sequence
  Synthetic
TTVELGNLQWHFNNPEEVKQFVEKLVKELNLQLKVHGDTYQIE

SEQ ID NO: 2953 - protein, 40 aa, Artificial Sequence
  Synthetic
EIHITVEGEKKAKDIYKELQKRNLEVELKVENGQFIITIR

SEQ ID NO: 2954 - protein, 43 aa, Artificial Sequence
  Synthetic
GEVHLNGITYHFSSPEQAKEFADKMAKKLGLEVQIHNGKFHIE

SEQ ID NO: 2955 - protein, 43 aa, Artificial Sequence
  Synthetic
DERVEKIVKELLDNGVDPRQVEEILRRQGVDDDEVREAIRRVL

SEQ ID NO: 2956 - protein, 40 aa, Artificial Sequence
  Synthetic
TNTYTIDDQKKAEELAQKLKNQGIPVTLTQENGKWKVHEH

SEQ ID NO: 2957 - protein, 43 aa, Artificial Sequence
  Synthetic
GTVKVGNETYHFPTTEAAQKWAEEYAKEKGLTVEKHGDTFHIE

SEQ ID NO: 2958 - protein, 43 aa, Artificial Sequence
  Synthetic
SKDDLIKKVWQAIQEGNEEKAERIARKAGVNREEARKLWEKQY

SEQ ID NO: 2959 - protein, 40 aa, Artificial Sequence
  Synthetic
EITYHMHGEEQARRLWEHAMRANLDAKLEVHNGEYILTVR

SEQ ID NO: 2960 - protein, 43 aa, Artificial Sequence
  Synthetic
SQKLLELIRKAEKNNRPFTYNGETYKPGTDDFERAKRQAEKEA

SEQ ID NO: 2961 - protein, 43 aa, Artificial Sequence
  Synthetic
PKDELQKRIEEARERGDRDEIERLLRKIGYSDDEASKIAKKLG

SEQ ID NO: 2962 - protein, 43 aa, Artificial Sequence
  Synthetic
SPKEVQVAWKALENNQTVTINGVTFKADNPELVKLAKKIWKEL

SEQ ID NO: 2963 - protein, 40 aa, Artificial Sequence
  Synthetic
RYQWHVEGEEQMKKAMREARKMNLDVKVEKHGDRYIIKAD

SEQ ID NO: 2964 - protein, 43 aa, Artificial Sequence
  Synthetic
PEEEIDKEIDKAIKNGDKDKVTELLKRKGIDEEEVKEIVEKLV

SEQ ID NO: 2965 - protein, 40 aa, Artificial Sequence
  Synthetic
KETIQVEGPEQAKEVIKKARKHNLEVEVRVENGKLILHLK

SEQ ID NO: 2966 - protein, 43 aa, Artificial Sequence
  Synthetic
LTVHVGNVTYHFDEPEQVKEFVDKWAKKQGMQYQFHGDTVHIE

SEQ ID NO: 2967 - protein, 41 aa, Artificial Sequence
  Synthetic
KTVTVNGETYTVTTEEEAKELARRLGVKTVTIDGDTITLTK

SEQ ID NO: 2968 - protein, 40 aa, Artificial Sequence
  Synthetic
DETYRVEGKEQALAWAEVAKKRNLSYEIRVENGKWVITLS

SEQ ID NO: 2969 - protein, 43 aa, Artificial Sequence
  Synthetic
NTVHVNGVQYDFNNPEEAKRFALEMAKKQNRQIHYKDGQFHVE

SEQ ID NO: 2970 - protein, 43 aa, Artificial Sequence
  Synthetic
TTVHVGNVKLTAPSPEVAKKLAEKWAKILNLKVVQHGDNWELK

SEQ ID NO: 2971 - protein, 40 aa, Artificial Sequence
  Synthetic
SYTLTVDGEEQLKWAIEVAKRVNLSFEVEIRGDRAIIHIK

SEQ ID NO: 2972 - protein, 43 aa, Artificial Sequence
  Synthetic
DKDLRDLIERLIKNGVDPRQIKEIVKRRGYDPHEVEEIIKQVG

SEQ ID NO: 2973 - protein, 40 aa, Artificial Sequence
  Synthetic
TTTITVTDEENARRIAKKYLKEGYTVELTQENGTWKINVG

SEQ ID NO: 2974 - protein, 40 aa, Artificial Sequence
  Synthetic
AVTYENPGEELARHWIKIAQDQNLDYEVEVRNGKFIVTIK

SEQ ID NO: 2975 - protein, 43 aa, Artificial Sequence
  Synthetic
TQVKVGDTTFQFDNPEEAKKAAQKLAKKYNVQYSVHGDTIKLE

SEQ ID NO: 2976 - protein, 43 aa, Artificial Sequence
  Synthetic
SRDAARKILELAKRGVTEVHVEGKTFDASNPEVQKRAKELLKK

SEQ ID NO: 2977 - protein, 40 aa, Artificial Sequence
  Synthetic
RFQYHVTGKEKADRIVNELKKQNLNVRVEEHNGHFIIEAE

SEQ ID NO: 2978 - protein, 43 aa, Artificial Sequence
  Synthetic
IQVTVDGVTYDFNNPEEAKRFAERVARERQLHVELHNGTFHFE

SEQ ID NO: 2979 - protein, 43 aa, Artificial Sequence
  Synthetic
VTVHVNGVTYHFSNPEEAKKFADKVAKSLGGTYEIHGNTIHVK

SEQ ID NO: 2980 - protein, 43 aa, Artificial Sequence
  Synthetic
KTVHVNGVQYHFDNPEQVKEFVKKMVEQLGGNVEFHGDTVHVE

SEQ ID NO: 2981 - protein, 43 aa, Artificial Sequence
  Synthetic
LTVHVGNVTYHFDEPEQAKEFAEKIAKKLGLQVHVHGETIRIE

SEQ ID NO: 2982 - protein, 43 aa, Artificial Sequence
  Synthetic
MDWVKEVTEKVRRGQQVHVTVKGQKYTIDSEEKLKEVEKKVRS

SEQ ID NO: 2983 - protein, 43 aa, Artificial Sequence
  Synthetic
QTLTVGNTTYTFDNPEEALKFAQKLAKELNLEIHQDGNTVTVQ

SEQ ID NO: 2984 - protein, 43 aa, Artificial Sequence
  Synthetic
VTVQFNGYEYHFDNPEQAEKLARRVAKELNLEMHIKDGTIQMK

SEQ ID NO: 2985 - protein, 43 aa, Artificial Sequence
  Synthetic
TTVHIGNETYHFDTEEEVKKFVEDVARKLGLEVRKHGDSWRVE

SEQ ID NO: 2986 - protein, 43 aa, Artificial Sequence
  Synthetic
LTVHVNGVTYHFTNPEQMRRFAEEVAKTYNLQIHVHGDEIHIE

SEQ ID NO: 2987 - protein, 40 aa, Artificial Sequence
  Synthetic
EIQITVHGPEQAKKVAKALKDQNLDVKVERHGDRLIIRAS

SEQ ID NO: 2988 - protein, 43 aa, Artificial Sequence
  Synthetic
KTVQFNGLTYTFPSPEAAQKAAKKLAKKAGLTVHVDGNTVTLK

SEQ ID NO: 2989 - protein, 43 aa, Artificial Sequence
  Synthetic
GTVKVNGTKYTFPSLEAAKKFAQKLAKKLNTTYTTKNGTITVK

SEQ ID NO: 2990 - protein, 43 aa, Artificial Sequence
  Synthetic
SQDEVKKKLQEAIDRGDESLAEELAKKAGLSPDQIEEVRERAK

SEQ ID NO: 2991 - protein, 43 aa, Artificial Sequence
  Synthetic
EKEIEDIARKLKENGVDERQVEEILKKLGVDDRQVEKVKRIIK

SEQ ID NO: 2992 - protein, 43 aa, Artificial Sequence
  Synthetic
SKVHVNGTTYEFPTPELAKKFAQKVAKENNLTVKVKNGKVTLE

SEQ ID NO: 2993 - protein, 40 aa, Artificial Sequence
  Synthetic
KVTFHVRGPEQAKAVVEAAARRNLEVHVERRGDEFIIHVE

SEQ ID NO: 2994 - protein, 43 aa, Artificial Sequence
  Synthetic
SQEDVKKEVKEVLKNGDEKRARELLQKAGVDDREIEEILKRLS

SEQ ID NO: 2995 - protein, 43 aa, Artificial Sequence
  Synthetic
KQVDVNGVTYQFDNPEKAKKFALEVAKKQNLTVEFHGDKITVK

SEQ ID NO: 2996 - protein, 43 aa, Artificial Sequence
  Synthetic
GTVQINGQTYTVPDPKAAKEYAQKLAKKYNLTVHVHGDTVTVK

SEQ ID NO: 2997 - protein, 43 aa, Artificial Sequence
  Synthetic
DEKVQRIVEKLYKNGVDPRQITEILRRRGVDERLVKRAVDEVS

SEQ ID NO: 2998 - protein, 40 aa, Artificial Sequence
  Synthetic
TQHIQVDTKEEAEKVIKELQKNNLDVHVTKVNGKWEIEVN

SEQ ID NO: 2999 - protein, 43 aa, Artificial Sequence
  Synthetic
SEEVEKIAEKLLKNGFSEEQITKVLRRQGVDPREVERAVKRVS

SEQ ID NO: 3000 - protein, 43 aa, Artificial Sequence
  Synthetic
DEVAEKVKEEVEKKGLDQEQIKRLLKELGVDDRQVERIVQEIS

SEQ ID NO: 3001 - protein, 40 aa, Artificial Sequence
  Synthetic
QITMTYDGEEAAKRALEAAKRMNYTAHLKVENGKFIITLE

SEQ ID NO: 3002 - protein, 43 aa, Artificial Sequence
  Synthetic
DDNAEKKAEKLAKNGESSDKIKEILKKLGVDPEKAERIARKYG

SEQ ID NO: 3003 - protein, 40 aa, Artificial Sequence
  Synthetic
AITITFEGEEQARRAWKDMANKNLDVKVEKHNGRWIVTAE

SEQ ID NO: 3004 - protein, 43 aa, Artificial Sequence
  Synthetic
DREEFRKEVKEVVKRGDEDRAREILERAGIDPREVEKIIRDLK

SEQ ID NO: 3005 - protein, 43 aa, Artificial Sequence
  Synthetic
TPEAERLAQELRKKNLRTLTINGIEVEATSEEEAKRLLEKAAN

SEQ ID NO: 3006 - protein, 43 aa, Artificial Sequence
  Synthetic
GTVHVGNTTYHFEDDEQVKRFVTEIARKLNLRVEQHGKTWHVS

SEQ ID NO: 3007 - protein, 43 aa, Artificial Sequence
  Synthetic
KEVHVNNVTYKFDNPEEALEFALKVAKSLNLRIEVHGDRIRVE

SEQ ID NO: 3008 - protein, 43 aa, Artificial Sequence
  Synthetic
TREAEKLAEQLLRDGVSKSEIKELAERLGLSPEEAEEAIRRAE

SEQ ID NO: 3009 - protein, 43 aa, Artificial Sequence
  Synthetic
KTVHVGNTTYTAPSDEAAQKIAEYWAKQLGLEVHQTNGTWTVQ

SEQ ID NO: 3010 - protein, 43 aa, Artificial Sequence
  Synthetic
AQVHVDGVTYTFDKPEEAAKFAKKMVEKKNGTVEIKDGQFHIE

SEQ ID NO: 3011 - protein, 43 aa, Artificial Sequence
  Synthetic
ITVDVNGVTYHFNNPEEVKKFIYKMAKSQNRQVTVHGNKYKIE

SEQ ID NO: 3012 - protein, 40 aa, Artificial Sequence
  Synthetic
TTTITVTTQEAAKKVAEELKRRGLTFEERVDGTTIEFRVD

SEQ ID NO: 3013 - protein, 43 aa, Artificial Sequence
  Synthetic
AEVHVKGVTIKFSSPEEAKRWAEEVAKKLGREFEVHGDTFHVK

SEQ ID NO: 3014 - protein, 40 aa, Artificial Sequence
  Synthetic
TTRFTTTDEEEARRYAEELKRRGIEVQVITEGTRFTVESR

SEQ ID NO: 3015 - protein, 43 aa, Artificial Sequence
  Synthetic
TTVEVNGTKYDIPNHEKAKKFAEKLAKKFNATVTQHGNTFKIT

SEQ ID NO: 3016 - protein, 43 aa, Artificial Sequence
  Synthetic
SDEEAKKEAERAYRENNKDRLKELKKKYEGNSVAEFVRDLLKN

SEQ ID NO: 3017 - protein, 40 aa, Artificial Sequence
  Synthetic
TTTYRTRDPREAKKWEEEAKKRGRKVEVSKHGDEFKVTVT

SEQ ID NO: 3018 - protein, 43 aa, Artificial Sequence
  Synthetic
TTVHVNGKTYTFPSLDAAAKRAKELAKKYNLTVHVDGDTVKVT

SEQ ID NO: 3019 - protein, 43 aa, Artificial Sequence
  Synthetic
REELEREAKKLYKNGASPEEIKRWLEKQGVSPEEAQRIVDKIL

SEQ ID NO: 3020 - protein, 43 aa, Artificial Sequence
  Synthetic
TTITINGQKYTAPSPDAAKKLAEKLAQKYGLKWKFENGRVTIK

SEQ ID NO: 3021 - protein, 40 aa, Artificial Sequence
  Synthetic
RYRYTTNGKEQADKVAEMLKAKNLDVKVEKHGDQWVVQAE

SEQ ID NO: 3022 - protein, 43 aa, Artificial Sequence
  Synthetic
TDEEIKKEVEEVVKNGDEDRARKLLQDLGIDDRQVEEIIKRIL

SEQ ID NO: 3023 - protein, 40 aa, Artificial Sequence
  Synthetic
EITYHTHGEEQAKKIVDMARAQNYEVEVEVHGNQWVVKVK

SEQ ID NO: 3024 - protein, 40 aa, Artificial Sequence
  Synthetic
SITVTFDGEEKAKRFVEEMKKRNLEVHLEIHNGKYVVTAK

SEQ ID NO: 3025 - protein, 43 aa, Artificial Sequence
  Synthetic
RTVHVNGLTFHFDNPEQAYKFVVEVARKSGLTFQFRGDTVHVE

SEQ ID NO: 3026 - protein, 40 aa, Artificial Sequence
  Synthetic
RITIEVHGQEQADKVKKMLEARNLEVEVQVHNGKIVLHAD

SEQ ID NO: 3027 - protein, 43 aa, Artificial Sequence
  Synthetic
SKVNVNNTTYTFDNPEEAAKFAKEIAKKLNLPVEVHGKEITVK

SEQ ID NO: 3028 - protein, 43 aa, Artificial Sequence
  Synthetic
LTVQVNGLQYTFSNPELVEKMAKEMAKKLQLEVQLHGNTWRIE

SEQ ID NO: 3029 - protein, 43 aa, Artificial Sequence
  Synthetic
SEEAKKEAKKLIKKGASPEEIKKILENLGASEDVKKWAEKEYK

SEQ ID NO: 3030 - protein, 40 aa, Artificial Sequence
  Synthetic
QETRTLDGDEAMKKALEIARKHNLEIEIQVHGNQWVVHVR

SEQ ID NO: 3031 - protein, 41 aa, Artificial Sequence
  Synthetic
TTLEVNGQRYTFNTSTEAEEFARKLGAQTVTIDGTRVEVRK

SEQ ID NO: 3032 - protein, 43 aa, Artificial Sequence
  Synthetic
PEEELKRKAEEAIRNGNNDKAKELLKRAGYSEEWAEKAIKKII

SEQ ID NO: 3033 - protein, 43 aa, Artificial Sequence
  Synthetic
RQEDLKEEAREALERGDEDRAREALKRAGVSDDEAEKFIQKVL

SEQ ID NO: 3034 - protein, 43 aa, Artificial Sequence
  Synthetic
KTVTVGNVTYHFDNPQQAVRFALEVAKTQNREVEFHGDHIHVE

SEQ ID NO: 3035 - protein, 43 aa, Artificial Sequence
  Synthetic
RSEELQRRAEEAVKNNDDDKAREILKKAGLSDEDAERFIQKAQ

SEQ ID NO: 3036 - protein, 40 aa, Artificial Sequence
  Synthetic
SVHYTFDGEEKAIKFAQEMKKQNLKAEVRVHGDKVVVEVE

SEQ ID NO: 3037 - protein, 43 aa, Artificial Sequence
  Synthetic
TQVVVGDEEYTFPNPEAAIKYAQKLAEKLGLTVEVHGNTVKLH

SEQ ID NO: 3038 - protein, 40 aa, Artificial Sequence
  Synthetic
TVHIHVDDKKKAQQIAQKWKNQGKEVHVTKLNGTYEIKVH

SEQ ID NO: 3039 - protein, 40 aa, Artificial Sequence
  Synthetic
AITVTFEGEDQARKFIEKMKKENYNVEVEVHNGQFVVTVK

SEQ ID NO: 3040 - protein, 43 aa, Artificial Sequence
  Synthetic
KQVDVDGVTYTFDNPEEAKRFAEEMARKKGAQVEYHGDRIRIE

SEQ ID NO: 3041 - protein, 40 aa, Artificial Sequence
  Synthetic
RIKITVEGEEQMKKAKKHLEDQNLDVKIEIRNGRFILHAE

SEQ ID NO: 3042 - protein, 43 aa, Artificial Sequence
  Synthetic
DELVEKATEEVRRKQLNEEQVRELAKRLNVDDRLVERLVRLVL

SEQ ID NO: 3043 - protein, 43 aa, Artificial Sequence
  Synthetic
SEDARKIFEEAQKRGYSEEEAAEVARKAGVDESEIEKIKRRYK

SEQ ID NO: 3044 - protein, 43 aa, Artificial Sequence
  Synthetic
VEVEVNGVTYKFNNPEEMLKFVDKVAKDYQLKVEFHGNKVKIE

SEQ ID NO: 3045 - protein, 43 aa, Artificial Sequence
  Synthetic
GTVIVGDTKYQYPNPEEAKKAAEELAKKYNLTVHEKNGTYNLK

SEQ ID NO: 3046 - protein, 43 aa, Artificial Sequence
  Synthetic
PTEDIKRKAEKALRNGQTITIGGITVTTEEELRRAEEWLRRQG

SEQ ID NO: 3047 - protein, 40 aa, Artificial Sequence
  Synthetic
DITITVDGEEKAHQVYQMMADRNLEVHLEVHNGKWVIHAR

SEQ ID NO: 3048 - protein, 43 aa, Artificial Sequence
  Synthetic
SEEAKELAEKLAKNGVSKEEIEKILRKNNFSPEDIKEARKAFD

SEQ ID NO: 3049 - protein, 43 aa, Artificial Sequence
  Synthetic
GTVIVGPTTYTFDTTDEAKKWAQKLADKYGLEVQVHNGTVKLH

SEQ ID NO: 3050 - protein, 43 aa, Artificial Sequence
  Synthetic
GQVTVNGQSYKFPNPELAIKFAKKAAKELGLEVHVHGNTVEVK

SEQ ID NO: 3051 - protein, 43 aa, Artificial Sequence
  Synthetic
ATVHMKNITYHFENPEEAKEFAEKLAKKLGGELHVKDGQFHID

SEQ ID NO: 3052 - protein, 43 aa, Artificial Sequence
  Synthetic
ITVDVNGLEYHFNNPEEAKKFAQEMAERLGGTWELHNGTIHVK

SEQ ID NO: 3053 - protein, 40 aa, Artificial Sequence
  Synthetic
SQTYRVRGEEQMKKMKKMAEKQNLEVEITQHGDEFILTIH

SEQ ID NO: 3054 - protein, 40 aa, Artificial Sequence
  Synthetic
RITWHVEGEEQMKKAVKAAKDMNLDVKVEVHNGQWVITAD

SEQ ID NO: 3055 - protein, 43 aa, Artificial Sequence
  Synthetic
VEVHVNGMTYHFDNPEQAKEMVKELAKKLNLTVEFHGNQIHVE

SEQ ID NO: 3056 - protein, 43 aa, Artificial Sequence
  Synthetic
TQVHVNGQTFTYDTTEVAEKVAKKIAKKYGLKVHVENNTIEIH

SEQ ID NO: 3057 - protein, 43 aa, Artificial Sequence
  Synthetic
TLEEEVRKIVKKGEEVTFTINGTDVTVKPGDEEAVKEVVKLWK

SEQ ID NO: 3058 - protein, 43 aa, Artificial Sequence
  Synthetic
GKVHVGDKTYEFDNPEKAKKWAKKLAKIYNLTVHIHGDQIKLK

SEQ ID NO: 3059 - protein, 43 aa, Artificial Sequence
  Synthetic
PDELKDQVRKLLENGVSPEELKKILKKQGVSDEEVDKIVRSVT

SEQ ID NO: 3060 - protein, 43 aa, Artificial Sequence
  Synthetic
NEEVKKIVTELRQKNVKKFTVNGHTVTVTSEEEIERLVRKLLM

SEQ ID NO: 3061 - protein, 40 aa, Artificial Sequence
  Synthetic
TKTLELTDETEARRAYEELRNRGLDVTITRDGTRFELRYE

SEQ ID NO: 3062 - protein, 40 aa, Artificial Sequence
  Synthetic
KETYQVQGEEAAKKRKEEAERRNLKVEIHVHGDQIIIHIE

SEQ ID NO: 3063 - protein, 43 aa, Artificial Sequence
  Synthetic
DIEEVIKKLKEVEKKGSTITVDGITITTSEQVKEVVEKLKKKL

SEQ ID NO: 3064 - protein, 43 aa, Artificial Sequence
  Synthetic
DQRELKKEVKEVARQGDEKRVRELLKQIGYSDEEVDKVVKRLL

SEQ ID NO: 3065 - protein, 43 aa, Artificial Sequence
  Synthetic
PEEVEKIFRELQRRGVDDRQVDDILKKQGVSDDEIREVKEKIK

SEQ ID NO: 3066 - protein, 43 aa, Artificial Sequence
  Synthetic
LTVKVNGVQYDFPNPEEAQKFAEKMAKEQGLRIEYHGNTIRIE

SEQ ID NO: 3067 - protein, 43 aa, Artificial Sequence
  Synthetic
TVEETVRKLQEVLEKNQPVTIGNTTYNDPNEIKRVVEEWQKKL

SEQ ID NO: 3068 - protein, 43 aa, Artificial Sequence
  Synthetic
PKEDIDRLWQLAQEGQTVTVNGQQVDPGSEYAKELERLYQEAQ

SEQ ID NO: 3069 - protein, 43 aa, Artificial Sequence
  Synthetic
REELKKILKKAQKGIPVKVTLNGVTITVTSEDAAKEAIKLAKK

SEQ ID NO: 3070 - protein, 40 aa, Artificial Sequence
  Synthetic
SITYEVHGKEQAQKIYEMLVKRNLTAHVHVHGDKIIIQAD

SEQ ID NO: 3071 - protein, 40 aa, Artificial Sequence
  Synthetic
KFTIESHGEEQAMAVLEWAKKQNLKAEVRVKNGKWEIHIE

SEQ ID NO: 3072 - protein, 43 aa, Artificial Sequence
  Synthetic
GTVEFNGKKITAPSPEAAKKIAEKLAKKYNLTVKTDGNKYTVK

SEQ ID NO: 3073 - protein, 40 aa, Artificial Sequence
  Synthetic
DYEYEVHGDEQAKKIIKMLQARNLDVKWEKHNGKIIVRAS

SEQ ID NO: 3074 - protein, 43 aa, Artificial Sequence
  Synthetic
KTVHVNGLTYHFSSPEQAKEFALRVAKKAGLQVEFHGETIKVE

SEQ ID NO: 3075 - protein, 40 aa, Artificial Sequence
  Synthetic
SETYTLHGDEQLKKMIEWAQKQNLEIHWEKRNGRIIVHIS

SEQ ID NO: 3076 - protein, 43 aa, Artificial Sequence
  Synthetic
LDEVKKVVERLLKNGYSEEQIKDILKKLGVSDEEVERAVKDVS

SEQ ID NO: 3077 - protein, 43 aa, Artificial Sequence
  Synthetic
TTVHVGNVTYHFSNPEEAKKFAQKVAEELGLTYEMKDDTIHVQ

SEQ ID NO: 3078 - protein, 43 aa, Artificial Sequence
  Synthetic
TQKAKELARKALEEGKTEVEVNGIKVSATTEEKLARLIEKAIY

SEQ ID NO: 3079 - protein, 43 aa, Artificial Sequence
  Synthetic
GTVHLNGKTYHFDDDTEVRKFVETVVKRLGLKVEQHGKEWHVS

SEQ ID NO: 3080 - protein, 43 aa, Artificial Sequence
  Synthetic
TTVTVNGITRTFPTPELAKKFAEKLAKKYNLTVTQTNGTFTVE

SEQ ID NO: 3081 - protein, 43 aa, Artificial Sequence
  Synthetic
PEDAAKWAKEFKNRGGTDEQIKRWLEKQGVSEEEAQRILKKAN

SEQ ID NO: 3082 - protein, 43 aa, Artificial Sequence
  Synthetic
MQVHYGNVTWTFDNPEQVKEFLAKLAKSLGLTYEVHNGQVQVK

SEQ ID NO: 3083 - protein, 43 aa, Artificial Sequence
  Synthetic
TEEEKKELQRLAKKGVSADQLEEIAKRLGISDDDARRLAEEAE

SEQ ID NO: 3084 - protein, 43 aa, Artificial Sequence
  Synthetic
EREKAKAAKLALELNKTEVTLNGRRFRFEDPEKAKELAERYKK

SEQ ID NO: 3085 - protein, 43 aa, Artificial Sequence
  Synthetic
DEELEKHVKRLLDNGVDKEQVKEILKRNGVDDRQVKEIIDRVE

SEQ ID NO: 3086 - protein, 43 aa, Artificial Sequence
  Synthetic
QQVTVGNETYTFPTPELAQKFAKKAAKERNLTVHIHGNTITVK

SEQ ID NO: 3087 - protein, 43 aa, Artificial Sequence
  Synthetic
KTVHVNGVEYRFDNPEEAKKFAEKVAKDLGRTFEVHGDTFHIE

SEQ ID NO: 3088 - protein, 43 aa, Artificial Sequence
  Synthetic
SKDDLTEEARRAWEDGNEDLAREILKRAGYSPEQIERIIRNLE

SEQ ID NO: 3089 - protein, 40 aa, Artificial Sequence
  Synthetic
KITIRTRGPEAMERIIQELRKQNLTVHVERHGDEFIITAE

SEQ ID NO: 3090 - protein, 43 aa, Artificial Sequence
  Synthetic
TTVHNGDTTYHFDTPDEAIKFAKEYAKKQNLPFEVHGNTITVK

SEQ ID NO: 3091 - protein, 40 aa, Artificial Sequence
  Synthetic
TTEKTYTDENEARRAAKEAKKKGLTVEIRQENGTWHVRVD

SEQ ID NO: 3092 - protein, 43 aa, Artificial Sequence
  Synthetic
SQVTVDGTTYEFPNPEKAQEFAKKYAKKAGLTVHIHGDQITIK

SEQ ID NO: 3093 - protein, 43 aa, Artificial Sequence [sequence omitted]

SEQ ID NO: 3094 - protein, 43 aa, Artificial Sequence
  Synthetic
YEVEMGDYKWTFSSLEEALRFAEEFAKKHNLTYELKGNKIEIE

SEQ ID NO: 3095 - protein, 43 aa, Artificial Sequence
  Synthetic
TRAEEAAKKAIKKGQPVTVTVNGVTFHITTQEQAKQVIQWAKN

SEQ ID NO: 3096 - protein, 43 aa, Artificial Sequence
  Synthetic
PSEELLKRARKAANNGDPETARELAERAGYSDDQLEEWIRKYE

SEQ ID NO: 3097 - protein, 40 aa, Artificial Sequence
  Synthetic
KITIEVDGEEALKKAIKIAQAHNLSWEVHEHNGKYIVHAE

SEQ ID NO: 3098 - protein, 43 aa, Artificial Sequence
  Synthetic
TTVTFGNQTWHASSDEEARKIAQKIAEKYNATVHENNGKITVK

SEQ ID NO: 3099 - protein, 43 aa, Artificial Sequence
  Synthetic
NWQEAVKLAQKAAKQQTTVTIGTKTFTNPEDAKKYAEALLKKY

SEQ ID NO: 3100 - protein, 40 aa, Artificial Sequence
  Synthetic
SFTLHVEGEEVAKELIKMAKKQNLKVEVEVRGDEFILTFK

SEQ ID NO: 3101 - protein, 40 aa, Artificial Sequence
  Synthetic
SETYTFHGEEKAQKFMKEAKKNNYRAEIEVHNGRFIVTLK

SEQ ID NO: 3102 - protein, 43 aa, Artificial Sequence
  Synthetic
LERAERVQEEVKRKQLSPEQISRLLRRAGVSEEEIKEIVRRIT

SEQ ID NO: 3103 - protein, 43 aa, Artificial Sequence
  Synthetic
GTVTVNGTTYTFPTTEEAQKFAQKYAEKYNTTFETHGDTVDLK

SEQ ID NO: 3104 - protein, 40 aa, Artificial Sequence
  Synthetic
GYEYHVHGDEVMKKIAKELKKQNLKVEVQVHNGRWVIQAE

SEQ ID NO: 3105 - protein, 43 aa, Artificial Sequence
  Synthetic
PKEDAERKAKKLYRSGNTDKARELLKRAGASEDEIRQVEKEAN

SEQ ID NO: 3106 - protein, 43 aa, Artificial Sequence
  Synthetic
PTELAKAALEALRKNQTVTVNGVTVHAGSPLAQKLAKIAKKVL

SEQ ID NO: 3107 - protein, 43 aa, Artificial Sequence
  Synthetic
SEIEKFIRELKKRGKTTLEFNGYRYNASNPEDFEKAARLWQKN

SEQ ID NO: 3108 - protein, 43 aa, Artificial Sequence
  Synthetic
LDEVRKRIEELLRNGVSPEQIKEELKRQGINEEEVEKVVRQLS

SEQ ID NO: 3109 - protein, 40 aa, Artificial Sequence
  Synthetic
TRTYKFTDPEEARRFAEELKKEGRTVRVETRGTTVTVTVD

SEQ ID NO: 3110 - protein, 40 aa, Artificial Sequence
  Synthetic
KVTVRFDGPEQAKEFAKEMKKQNLNVEVHIHGDKAEVTFE

SEQ ID NO: 3111 - protein, 43 aa, Artificial Sequence
  Synthetic
ITVHVNGVTYHFPNPEEVKKFVKKVAESQGRTYEVHGNEIHIE

SEQ ID NO: 3112 - protein, 43 aa, Artificial Sequence
  Synthetic
TEVHIGNVTYHFPNPQEVLKFAQEMAKKLGLQLEIHGDTVKVE

SEQ ID NO: 3113 - protein, 40 aa, Artificial Sequence
  Synthetic
QITFHMDGEEQAKKAAELAKKKNLSFRIEIHNGKFIIHAS

SEQ ID NO: 3114 - protein, 43 aa, Artificial Sequence
  Synthetic
QDDEETAKEIAKRLGTSTEEAKRLLDKAGGDPKKAENIFKKKH

SEQ ID NO: 3115 - protein, 43 aa, Artificial Sequence
  Synthetic
KEEEELKKALRAAERGETVTVNGITITSPEEAKEAIKKAQKKY

SEQ ID NO: 3116 - protein, 43 aa, Artificial Sequence
  Synthetic
GTVHLGGKTYQFPNPDLAEKFARELAEKLNLTLFVEGNTVKVE

SEQ ID NO: 3117 - protein, 40 aa, Artificial Sequence
  Synthetic
AVTYHVDGEEAAKKEKKRLLAQNLRVEIHRHGDQWVLTAK

SEQ ID NO: 3118 - protein, 43 aa, Artificial Sequence
  Synthetic
LTVHVNGVQYHFDKPEQAKEFAKRMAETHNLEVHIHGETIRVE

SEQ ID NO: 3119 - protein, 40 aa, Artificial Sequence
  Synthetic
SITITIDGEEKAKKVYKMMQKRNLEVHITQHGNKWVVTAS

SEQ ID NO: 3120 - protein, 40 aa, Artificial Sequence
  Synthetic
EEEITVEGEEQAKKVAEMAKKRNLKYEIEVHGNQIVIKLK

SEQ ID NO: 3121 - protein, 43 aa, Artificial Sequence
  Synthetic
KTLKVGTTTYTYPNPQEAIEVAKKLAKKANLTVRVHGNTITVQ

SEQ ID NO: 3122 - protein, 43 aa, Artificial Sequence
  Synthetic
DEEIEKIVRELKRRGVSEKEIEDILRRNNVDPRQLDKARKVYS

SEQ ID NO: 3123 - protein, 43 aa, Artificial Sequence
  Synthetic
VTVHVGNTTYHFSNPEEAKKFAETMAKRLGLQVKHHGNEIKME

SEQ ID NO: 3124 - protein, 43 aa, Artificial Sequence
  Synthetic
SKAAKLAEEIYKSGTTRSFTVNGETYTITSKEEAERLLKKLQN

SEQ ID NO: 3125 - protein, 40 aa, Artificial Sequence
  Synthetic
SVTYELHGEEQAKKMKKEAEKQNLRVEIKVENGKYIVTID

SEQ ID NO: 3126 - protein, 43 aa, Artificial Sequence
  Synthetic
TQVHVDNVTYHFDNPEEAKKFADEVAKKKGLTWTVKDGQFHIE

SEQ ID NO: 3127 - protein, 40 aa, Artificial Sequence
  Synthetic
KYTITFNGEEQAKKFADEMHKRNLEFEIQIHNGKYVITVH

SEQ ID NO: 3128 - protein, 43 aa, Artificial Sequence
  Synthetic
TQVKVGNTTFTAPSLDAAYEWAKKLAKKLGKQVTIFGDTVQVH

SEQ ID NO: 3129 - protein, 40 aa, Artificial Sequence
  Synthetic
DITYTFNGEEQARRFWKLMVDRNLEAQIRVQNGKAIVDVR

SEQ ID NO: 3130 - protein, 43 aa, Artificial Sequence
  Synthetic
PKEEAKKRAEKAIRSGNKDKARKILRNAGVDESEIKQIEKEVE

SEQ ID NO: 3131 - protein, 43 aa, Artificial Sequence
  Synthetic
TKVDVGNTTYTADSWKDLLKYAQELAKKLGLTVELHGNTIKVH

SEQ ID NO: 3132 - protein, 43 aa, Artificial Sequence
  Synthetic
HTVQVGDKTIHATSKDEAQKIAEEFAKKYNAKVTVTNGHFKVK

SEQ ID NO: 3133 - protein, 43 aa, Artificial Sequence
  Synthetic
KTVHINGVTYHFPNPEEAVKFAEKMARKQNRTIEFHGDEIRVE

SEQ ID NO: 3134 - protein, 43 aa, Artificial Sequence
  Synthetic
VTVHVNGVQYDFSNPEEAKRFAEEVARKQNRTIEIHGNTIHVE

SEQ ID NO: 3135 - protein, 43 aa, Artificial Sequence
  Synthetic
TEQDEAKAIKKALEKGTTVNVNGITVTTPEEAKKWAELLKKLL

SEQ ID NO: 3136 - protein, 40 aa, Artificial Sequence
  Synthetic
TETIKVQDQKKAEEIAKEFKKQGKEVTLQQKNGTWHVHVK

SEQ ID NO: 3137 - protein, 43 aa, Artificial Sequence
  Synthetic
TKVHVNGKTYTFPSPDLAKKFAEKVAKKYNLTVHVDGNTVKVK

SEQ ID NO: 3138 - protein, 43 aa, Artificial Sequence
  Synthetic
KTVRVDGIDYTFDKPEQVVKFALEMAKKLGLEVHFKGDQVDVK

SEQ ID NO: 3139 - protein, 43 aa, Artificial Sequence
  Synthetic
TEEVEKVVKELLDRGVDERQVVEVLQRLGIDEKEVQHVVKKVS

SEQ ID NO: 3140 - protein, 40 aa, Artificial Sequence
  Synthetic
EIHIEVHGEEQMKKAIEWAKRANLEAKVEVRGDKIIVTAD

SEQ ID NO: 3141 - protein, 40 aa, Artificial Sequence
  Synthetic
TETYTTTDTTEAERIAREFKKKGLTVEIRKHNGTFTIRVE

SEQ ID NO: 3142 - protein, 43 aa, Artificial Sequence
  Synthetic
LTVHINGVTYHFDNPEKAKKFAEEIARKQNREVKVKDGTFHVE

SEQ ID NO: 3143 - protein, 40 aa, Artificial Sequence
  Synthetic
EIRIHVDGEEKAKKEMEKLQRANLDVKIEIHNGQFVLRAK

SEQ ID NO: 3144 - protein, 40 aa, Artificial Sequence
  Synthetic
TTTLHFTDRREAERAREEAERKGLTVRIEKVGTTWRLEVR

SEQ ID NO: 3145 - protein, 43 aa, Artificial Sequence
  Synthetic
GKVTFNGTTIEFPTKDAAKRFAEELAKKLGGTVTVKNGTYQVH

SEQ ID NO: 3146 - protein, 40 aa, Artificial Sequence
  Synthetic
SWKIRVHGREQAKKVIEMLRRRNLEVHWEEHNGDIVIKAD

SEQ ID NO: 3147 - protein, 40 aa, Artificial Sequence
  Synthetic
TIHITTTDPEAARKLKEEAERRGLTVTVRETNNRWTVEIR

SEQ ID NO: 3148 - protein, 40 aa, Artificial Sequence
  Synthetic
EETIKVTGEEQMKRAVEEAKRRNLDVEVEQDGDEFIITIK

SEQ ID NO: 3149 - protein, 40 aa, Artificial Sequence
  Synthetic
AYRVTFQGEEKARKYAKEMKKRNLDVRLEEHNGNFVVEVH

SEQ ID NO: 3150 - protein, 43 aa, Artificial Sequence
  Synthetic
REDDKIKEIEKRARKGEPVTINGNTYTNPEEAKRAAEEYLRRQ

SEQ ID NO: 3151 - protein, 43 aa, Artificial Sequence
  Synthetic
PEEELLKELVKALENNDEDKVKDIIRKLNVSDEQVEELVKKVQ

SEQ ID NO: 3152 - protein, 40 aa, Artificial Sequence
  Synthetic
KFTVTTHGEEAARKIVEYAKRQNLEVHVTRHGDRIIITVE

SEQ ID NO: 3153 - protein, 40 aa, Artificial Sequence
  Synthetic
EQTWHFDGEEQARKAYKELAKQNLEVHIEVENNKWRVTAR

SEQ ID NO: 3154 - protein, 43 aa, Artificial Sequence
  Synthetic
DKREVVEEIYKARQNNDEDKVKRLLREYNIDEKEVEDIVRKLL

SEQ ID NO: 3155 - protein, 43 aa, Artificial Sequence
  Synthetic
LTVHVQGVTYHFSSPEQAKRFAEEMAKRLNLTVEVHGNTFKVE

SEQ ID NO: 3156 - protein, 40 aa, Artificial Sequence [sequence omitted]

SEQ ID NO: 3157 - protein, 43 aa, Artificial Sequence
  Synthetic
LTVTVDGLTYTFDNPEEFLRFVEQMAREKNADVHYHGEKVEVK

SEQ ID NO: 3158 - protein, 43 aa, Artificial Sequence
  Synthetic
TPDAEKIAKELKKRGANPDEIKKELKKQGVSEDEAERAVREVA

SEQ ID NO: 3159 - protein, 43 aa, Artificial Sequence
  Synthetic
LDEVRKRVEELKKNGVDDRQVEEILKRLGISDEQVRRLIDQVK

SEQ ID NO: 3160 - protein, 43 aa, Artificial Sequence
  Synthetic
TEKAKKLVEEAFRRNLSEEQAERLAKKQGLDPDEAREIWRRLY

SEQ ID NO: 3161 - protein, 43 aa, Artificial Sequence
  Synthetic
SEVERKLKEAAKNDQPITVHINGQTITVTTSEDAKRALKKLKN

SEQ ID NO: 3162 - protein, 43 aa, Artificial Sequence
  Synthetic
DEKVKRIIEELRKQGIDPREIKEILKRQGVDPRVVEKVARQVH

SEQ ID NO: 3163 - protein, 40 aa, Artificial Sequence
  Synthetic
TTTLTVTDEEEAKKVEKEVRRRGNKVEVRRHGDKFEVRET

SEQ ID NO: 3164 - protein, 40 aa, Artificial Sequence
  Synthetic
RITITTHGPEQAKKIIEMAKRRNLSVEIHIHGDKIILHLE

SEQ ID NO: 3165 - protein, 40 aa, Artificial Sequence
  Synthetic
TETRTFTNEEEARRWAKEAKKNGRDVEITKDGTTFNVTFK

SEQ ID NO: 3166 - protein, 43 aa, Artificial Sequence
  Synthetic
TTVKLRGQEYQAESPEAAQKIAEKLAQKYNLTYEVHGNTVTIK

SEQ ID NO: 3167 - protein, 43 aa, Artificial Sequence
  Synthetic
GTVEFNGQQYHFPDPTQVKKFVKTVAKRLGLEVREKDGKWELH

SEQ ID NO: 3168 - protein, 43 aa, Artificial Sequence
  Synthetic
GTVTLGNTQYTLPSPEAAIKFAKELAKNFGLEVHVHNGNVTIK

SEQ ID NO: 3169 - protein, 43 aa, Artificial Sequence
  Synthetic
QTIHVGDLTYHVPNPKKAKELAKKLAKKYNLTIRIHGNTIKVH

SEQ ID NO: 3170 - protein, 40 aa, Artificial Sequence
  Synthetic
TQTYTTEDREEARKWEEWAKKQGLTVRVEERNGKFNVEVT

SEQ ID NO: 3171 - protein, 43 aa, Artificial Sequence
  Synthetic
TDEAEKIARELQKKGYSIEEAKEILKRLGVSEEELKKVEKRLK

SEQ ID NO: 3172 - protein, 43 aa, Artificial Sequence
  Synthetic
SDEEEKEKLEEAKRQGDQDAIRKIARKLGLSEETIKQLRKEAG

SEQ ID NO: 3173 - protein, 43 aa, Artificial Sequence
  Synthetic
DEELKKDAKRLYDEGVSPEEIKEILKRQGVSDEEVEKVVRYVS

SEQ ID NO: 3174 - protein, 43 aa, Artificial Sequence
  Synthetic
NEEVKEIVERLLKNGVSEEQIKEILERRGVDPREVERVIKEVS

SEQ ID NO: 3175 - protein, 43 aa, Artificial Sequence
  Synthetic
NTVRVNGVDYDFDNPEQAKKFAKEVAKKQNLEVHFKDGTFEIK

SEQ ID NO: 3176 - protein, 43 aa, Artificial Sequence
  Synthetic
TDDTRKALKELAKGATEVRINGYTYSASDDKVRELLERWKNEQ

SEQ ID NO: 3177 - protein, 43 aa, Artificial Sequence
  Synthetic
QKVHVQGKTFTFPTPEAAKKFAKKAAKKYNLTVEVHGNQITIK

SEQ ID NO: 3178 - protein, 43 aa, Artificial Sequence
  Synthetic
RTVHVGNLTYHFDNPEEVKKFVEEVAKKKGLRVEWHGEEVHIE

SEQ ID NO: 3179 - protein, 43 aa, Artificial Sequence
  Synthetic
DEKVEQLVRELLDQGVSPDEVKEDLKKRGVDEREIEKAIRKAL

SEQ ID NO: 3180 - protein, 43 aa, Artificial Sequence
  Synthetic
SQDQAEYVKQALNNGASEDEARKLAEKNNIDPDIVRQAYEEWL

SEQ ID NO: 3181 - protein, 43 aa, Artificial Sequence
  Synthetic
QQVTFNGKTYTFDNPQAAKEFAKKIAKEYNLTVEIHGNTITVK

SEQ ID NO: 3182 - protein, 43 aa, Artificial Sequence
  Synthetic
DERLKELAERLKKNGVSPEQLKEIAKKQGVDDRQVEELVRLVY

SEQ ID NO: 3183 - protein, 43 aa, Artificial Sequence
  Synthetic
TQLTVGTTTYTFPNPEEAKKVAKKLAKKYNLQIEIHGNTITVK

SEQ ID NO: 3184 - protein, 40 aa, Artificial Sequence
  Synthetic
KITWHVEGEEQIKKAIKQAQKNNLEVHVRKENGKWIVEAE

SEQ ID NO: 3185 - protein, 40 aa, Artificial Sequence
  Synthetic
TIHLEYPSKEAAQKVAKQWQKQGKDVTVRKVNGKFQVEVN

SEQ ID NO: 3186 - protein, 43 aa, Artificial Sequence
  Synthetic
EEELKKLIDELKRRGVDREEVVDILRKQGVDPRQLREVRKIVS

SEQ ID NO: 3187 - protein, 40 aa, Artificial Sequence
  Synthetic
KTQVQFDTKEAAEEYAKKAKKKGIEVHVHQNGDTYKVELR

SEQ ID NO: 3188 - protein, 43 aa, Artificial Sequence
  Synthetic
TEVHVNGVTYKFTNPEQVLRFAEELAKKLNATMEVRGEQVHVE

SEQ ID NO: 3189 - protein, 43 aa, Artificial Sequence
  Synthetic
LEVTVNGVEYKFDEPEQAKKFAEKVAKEQNAEVRLKDGTFHIE

SEQ ID NO: 3190 - protein, 43 aa, Artificial Sequence
  Synthetic
DEKVQEIIKRVKDNNLKTVTVNGVDINVEDEDKVRELIKKVLG

SEQ ID NO: 3191 - protein, 40 aa, Artificial Sequence
  Synthetic
QLRFETNGEEQAKKVLEEAKKHNLEAHVTIENGKWVVHVK

SEQ ID NO: 3192 - protein, 43 aa, Artificial Sequence
  Synthetic
TKVKVNGTTYKYPTTEAAQKAAEKIAKKLGLQVTKVGNVFQVH

SEQ ID NO: 3193 - protein, 43 aa, Artificial Sequence
  Synthetic
ITVHINGYTYHFSSPEEVRKFAEKLAKQLNLTIHIEGNTVHVE

SEQ ID NO: 3194 - protein, 43 aa, Artificial Sequence
  Synthetic
SEELRERIERLLRNGINPEEIRKLAEKLGYSPDEVKEALKKLG

SEQ ID NO: 3195 - protein, 43 aa, Artificial Sequence
  Synthetic
TQVTYNGKTFTFPTDEAAKKYAEKVAKKYNGTVELHNGTFKVH

SEQ ID NO: 3196 - protein, 40 aa, Artificial Sequence
  Synthetic
SLTIEVEGEEQARKLEEKAKKHNLRVEIRQHGDKYIVHID

SEQ ID NO: 3197 - protein, 43 aa, Artificial Sequence
  Synthetic
PEEAREKAERLQRKGVSDEEATKILKKLGYSEEEARRAIERAK

SEQ ID NO: 3198 - protein, 43 aa, Artificial Sequence
  Synthetic
KTVHVGNTTYTFPTEDLAAKFAKEIAKKLGATVHVKNGDVQVK

SEQ ID NO: 3199 - protein, 43 aa, Artificial Sequence
  Synthetic
NTVTFNGLTYHFNNPEEAKKFAEEVAKKLGLQVHLKDGQFQMK

SEQ ID NO: 3200 - protein, 43 aa, Artificial Sequence
  Synthetic
TKVIVNGQTLTFPNPEEAQQAAEELAKIYNATVTQKNGTFHVK

SEQ ID NO: 3201 - protein, 40 aa, Artificial Sequence
  Synthetic
TTTITVTDETKAREIAQRLRDNGRRVELRKHNGTVTIRFD

SEQ ID NO: 3202 - protein, 43 aa, Artificial Sequence
  Synthetic
SQVILGNKTITVPNPDLAQKIAEKLAKLYNLKVTKKNGNFHVQ

SEQ ID NO: 3203 - protein, 43 aa, Artificial Sequence
  Synthetic
IDELTKQARELKKRGVDPEQVKEILKRQGVSDEQIRRVEKRVV

SEQ ID NO: 3204 - protein, 43 aa, Artificial Sequence
  Synthetic
GTVKLGDLEYHIPTPEKAEELARQLAKKYNLTVRVHGDTIQVH

SEQ ID NO: 3205 - protein, 43 aa, Artificial Sequence
  Synthetic
SEKVKRIVERLLKSGVDDRQIRETLRRAGVDEREVDRIIKELK

SEQ ID NO: 3206 - protein, 43 aa, Artificial Sequence
  Synthetic
TEVHVNGVTYHFDEPEQVKEFLKKVVKSLGLTYDVENGKYKVE

SEQ ID NO: 3207 - protein, 43 aa, Artificial Sequence
  Synthetic
IDDAKEYAKEARKKGVNPKQIEQYAKDLGLSPEDARRILKEVF

SEQ ID NO: 3208 - protein, 43 aa, Artificial Sequence
  Synthetic
SEDEAEKKVREALSRGNEEEAKKVAKTYNLTPERVERIRRELE

SEQ ID NO: 3209 - protein, 43 aa, Artificial Sequence
  Synthetic
RREEELARRLAKEFGISPEQAQKALDKANGNEDKAKQIIKEEQ

SEQ ID NO: 3210 - protein, 40 aa, Artificial Sequence
  Synthetic
TIQLTFPDEKAAQEAAQKYKNQGLEVHVTKNGDKFTIHVH

SEQ ID NO: 3211 - protein, 40 aa, Artificial Sequence
  Synthetic
EETITIDDPEKAKKIIEEARKKNLEVHVEFHGDRATITIR

SEQ ID NO: 3212 - protein, 43 aa, Artificial Sequence
  Synthetic
NEEELERIAKKLIKKGNEEDLKELRKKDPRAEDAIKKARKKFL

SEQ ID NO: 3213 - protein, 43 aa, Artificial Sequence
  Synthetic
LTVHVKGMTYHFNNPEEVYRMAVEMAKKLGGELRVKDGTFHVD

SEQ ID NO: 3214 - protein, 43 aa, Artificial Sequence
  Synthetic
NPEQEKILALAQKGQPVTVTVNGITYTVTTEEAAKVAIQLLRN

SEQ ID NO: 3215 - protein, 43 aa, Artificial Sequence
  Synthetic
KTVHIQGLTYNFNNPEEAYKYAKELAKKYNLQVTIDGNTVEVH

SEQ ID NO: 3216 - protein, 43 aa, Artificial Sequence
  Synthetic
DERVEKIVERLIRNGYSEDEVIEIVKRKGADEDEVKKVVEKLS

SEQ ID NO: 3217 - protein, 43 aa, Artificial Sequence [sequence omitted]

SEQ ID NO: 3218 - protein, 43 aa, Artificial Sequence
  Synthetic
AQVHVNGVTYDFDRPEEAKEFAKKVAEKLGLQIKVENGKIKVE

SEQ ID NO: 3219 - protein, 43 aa, Artificial Sequence
  Synthetic
GQVNVNGQTYKFETEEEVEKFVREVASKLGLQVHEKDGTFHLK

SEQ ID NO: 3220 - protein, 40 aa, Artificial Sequence
  Synthetic
GITVRFDGEEQARRFYEEMARRNLNVEIHVKNGKWEVTAE

SEQ ID NO: 3221 - protein, 43 aa, Artificial Sequence
  Synthetic
TTVKVNGQKYTYPSTEAARKAAKKLAKKYNATVKVFGNTVQVH

SEQ ID NO: 3222 - protein, 43 aa, Artificial Sequence [sequence omitted]

SEQ ID NO: 3223 - protein, 43 aa, Artificial Sequence
  Synthetic
GTLHLNGVEYRFPEPEQAKEFAKKMAKKLNLEVQIHNGTLHIE

SEQ ID NO: 3224 - protein, 40 aa, Artificial Sequence
  Synthetic
TTHVRTTDEENAKEIAREAAERGYEVHIRRTNDTWEVEIR

SEQ ID NO: 3225 - protein, 43 aa, Artificial Sequence
  Synthetic
TQIDINGQTYHIDDEEKVKKFVETLVRRLNLKIETHGNTIKVS

SEQ ID NO: 3226 - protein, 43 aa, Artificial Sequence
  Synthetic
PEELKRRLEEVSRKSGSRETLQRILKKAGYSEEEAERIARKIN

SEQ ID NO: 3227 - protein, 43 aa, Artificial Sequence
  Synthetic
DELQRLFDEALKKANGDEDKVREILKRLGIDDRQIEQAKRKWS

SEQ ID NO: 3228 - protein, 43 aa, Artificial Sequence
  Synthetic
STLEINGTKYTLPSVEAAKKLAKKLAKHLGLDVQVDGNHVTVH

SEQ ID NO: 3229 - protein, 43 aa, Artificial Sequence
  Synthetic
STVTVGNETYKFPSPDAAKKFAEEAAKKYNLTVQKDGNTFRVK

SEQ ID NO: 3230 - protein, 43 aa, Artificial Sequence
  Synthetic
ATVHVGNVTYHFSSPEEAKKFAEKVAKTYNLQIEFHGETWRVE

SEQ ID NO: 3231 - protein, 40 aa, Artificial Sequence
  Synthetic
TYEFTVTDREEAKKWKKWAASEGREVRIEERNGTFRVEVH

SEQ ID NO: 3232 - protein, 40 aa, Artificial Sequence
  Synthetic
SITITTHGEEQMKRAVEEMRRRNLEVHVEQRGDQWVVHAD

SEQ ID NO: 3233 - protein, 40 aa, Artificial Sequence
  Synthetic
EDEVTFDGKEKADKYAKELKERNLKVEVHVKNGKYVVRVE

SEQ ID NO: 3234 - protein, 43 aa, Artificial Sequence
  Synthetic
DEKELKKELERAQRNNDADKVEEILKRLGVDEKEVQKIVKRVR

SEQ ID NO: 3235 - protein, 43 aa, Artificial Sequence
  Synthetic
QTVHVGNTTYHFDNPEQAKKFAEEVARKQNLRIEHHGDTIKIE

SEQ ID NO: 3236 - protein, 43 aa, Artificial Sequence
  Synthetic
TKVQVNGKTYTFPTTEAAQKFAQKVAKKQNLKITTHGNTVKIE

SEQ ID NO: 3237 - protein, 43 aa, Artificial Sequence
  Synthetic
TTVVNGDLHVTFDSPEEAKKYAQKLADKLGLTVHIHGDKFKVE

SEQ ID NO: 3238 - protein, 40 aa, Artificial Sequence
  Synthetic
EITFENHGEEQARRVEEWARRANLEVEIRVHNGKFIVHVS

SEQ ID NO: 3239 - protein, 43 aa, Artificial Sequence
  Synthetic
VTVHIGNVTYHFDEPEQAKKWAEELAKKLNLTIHIHGDEIRVQ

SEQ ID NO: 3240 - protein, 43 aa, Artificial Sequence
  Synthetic
QTIHVGNYTYTFDNPEEALKFALKLAKERNRDLEIRGDTYHIE

SEQ ID NO: 3241 - protein, 43 aa, Artificial Sequence
  Synthetic
KQVNVNGVTYTFNNPEEVKKFVEEMVKKLGAKVEWHGDQIDIE

SEQ ID NO: 3242 - protein, 43 aa, Artificial Sequence
  Synthetic
DREKVKREVQEVLKRGDEDRARKLLQDAGVSDEEVEKILRRLL

SEQ ID NO: 3243 - protein, 43 aa, Artificial Sequence
  Synthetic
TTVRVDGVEYHFDNPEEAKKFVEKMVKKKNGTVELHNGTFHIE

SEQ ID NO: 3244 - protein, 43 aa, Artificial Sequence
  Synthetic
PDEARRLAEEARKNGVSPEEIKKLIEKLGLSPEEAQRVVDEAW

SEQ ID NO: 3245 - protein, 43 aa, Artificial Sequence
  Synthetic
EEEVRKIVERLLKNGVDPRQVREILQRNGFSDEEIDKVLKEAA

SEQ ID NO: 3246 - protein, 43 aa, Artificial Sequence
  Synthetic
STLHINGKTYTFPSPEAAAEYAKKQAKKYNLTVEIHGNTVKVK

SEQ ID NO: 3247 - protein, 43 aa, Artificial Sequence
  Synthetic
STVIFNGKKVTFPSPEAAKKYAEKAAKKLNATVHIENGTFKVE

SEQ ID NO: 3248 - protein, 40 aa, Artificial Sequence
  Synthetic
SVEYTFDGEELAKKMMEALRAHNLDVKIEVRGDKIILKAD

SEQ ID NO: 3249 - protein, 40 aa, Artificial Sequence
  Synthetic
SFKIEVEGQELAKKIAKELKKQNLEVHIHVHGDRVIIEAR

SEQ ID NO: 3250 - protein, 40 aa, Artificial Sequence
  Synthetic
RWQYHVTGEEQARRAWKHLAKMNLDVKIEVHGDRFILNAD

SEQ ID NO: 3251 - protein, 43 aa, Artificial Sequence
  Synthetic
ATVHVGNVTYHFPSPEEVDEFAKKMAKKLNLRIEIHNNTWHVE

SEQ ID NO: 3252 - protein, 43 aa, Artificial Sequence
  Synthetic
GKVTFNGKTVTIPNVDKAIEFAKKVAKEAGLEVHVHGTTVTLK

SEQ ID NO: 3253 - protein, 43 aa, Artificial Sequence
  Synthetic
ITVHVNGLTFHFDNPEEVKEFAKKVAEKAGLQVEWHGNTVKME

SEQ ID NO: 3254 - protein, 43 aa, Artificial Sequence
  Synthetic
LRVNVDGVTYEFDEPEQAKEFALRVAQKKGGTFELHNGTIQVK

SEQ ID NO: 3255 - protein, 43 aa, Artificial Sequence
  Synthetic
DEEVKKIIEDLLRKGVDPRQIQERVKRRGADEEDVKRLLRELS

SEQ ID NO: 3256 - protein, 43 aa, Artificial Sequence
  Synthetic
PDEVKKIVEKLAKQGVDERQISEYLKRQGVDDEEIKQARRLLR

SEQ ID NO: 3257 - protein, 43 aa, Artificial Sequence
  Synthetic
QEEVKKKAKELKKQGIDPEQVVDRLRKEGVDPEVLKEVRKILS

SEQ ID NO: 3258 - protein, 43 aa, Artificial Sequence
  Synthetic
GQVTVNGTTYTFPSPEAAKKFAEEAAKKLGLKVEKHNGKFTVQ

SEQ ID NO: 3259 - protein, 43 aa, Artificial Sequence
  Synthetic
EPKEAAKEAKRAAEEGDEDRIREVAKRLGVNPEELREILKRLL

SEQ ID NO: 3260 - protein, 43 aa, Artificial Sequence
  Synthetic
TTVKVNNQEYTFPTNDAAKEFAEKAAKKYNLTVTKFGNTFQVH

SEQ ID NO: 3261 - protein, 43 aa, Artificial Sequence
  Synthetic
PEEARKLVEELLRRGVSIDQIEKEARDRGDSETAEVARRIKEG

SEQ ID NO: 3262 - protein, 40 aa, Artificial Sequence
  Synthetic
SYTIEVEGEEAAREAVKYAKAMNLEVHVEEHNGKFIIHAE

SEQ ID NO: 3263 - protein, 43 aa, Artificial Sequence
  Synthetic
QPEAAQLAYKAVEEGRPVTINGTTYSPTSPYAQKLYKLFQKLF

SEQ ID NO: 3264 - protein, 43 aa, Artificial Sequence [sequence omitted]

SEQ ID NO: 3265 - protein, 43 aa, Artificial Sequence
  Synthetic
SDEARKAAEKAQRLGLNDDQIEEFLQRAGVDPEEAQELIKEIR

SEQ ID NO: 3266 - protein, 43 aa, Artificial Sequence
  Synthetic
TAEEAIKILLKAAKNNTPVTVNGITVTTTDKAKKLAEKLKKQV

SEQ ID NO: 3267 - protein, 43 aa, Artificial Sequence
  Synthetic
LTVHVGNVTYHFSSPEEAKKFAEKMAKTLGREVKVDGNTYHIE

SEQ ID NO: 3268 - protein, 43 aa, Artificial Sequence
  Synthetic
TKEVRDIVKDLRDRGVSREEIKKILERNNVDPREVERVIKEVG

SEQ ID NO: 3269 - protein, 43 aa, Artificial Sequence
  Synthetic
ITVEVNGVEYHFNNPEEVLEFVKRMAETQNRELQVHNGKFKVE

SEQ ID NO: 3270 - protein, 43 aa, Artificial Sequence
  Synthetic
TYKELAKKLKEAIKKGQTVTVNGYKVSSPELAKKVIEKLEKLA

SEQ ID NO: 3271 - protein, 40 aa, Artificial Sequence
  Synthetic
DFRIETHGEEQAKKAYKHLAARNLEVHVEVHNGKWVLRAS

SEQ ID NO: 3272 - protein, 43 aa, Artificial Sequence
  Synthetic
TTVHVNGVQYHFSSLEQAKKFAEKVAKKLGLQLEVHGNTWKVE

SEQ ID NO: 3273 - protein, 43 aa, Artificial Sequence
  Synthetic
LQVHVGNVTYHFSSLEEVRKFVEEVAKKKGLQVHVDGNTVHVE

SEQ ID NO: 3274 - protein, 43 aa, Artificial Sequence
  Synthetic
TTVNFGNTTYHAPSAEAAQKIAKKLAKEYNLQVTVDGNTVTVT

SEQ ID NO: 3275 - protein, 43 aa, Artificial Sequence
  Synthetic
AQVDVGNVTYKFDTLEQARRFAEKMAKDLGLQVELHGNRLEVE

SEQ ID NO: 3276 - protein, 43 aa, Artificial Sequence
  Synthetic
ATVDVNGVTYHFETPEEAKKFAQQIAEELNLKIEYHGDKIRVE

SEQ ID NO: 3277 - protein, 43 aa, Artificial Sequence
  Synthetic
TEVHVNGKKITIPNQQKAQELAKKIAKKLGLKLEIHGKEIHVE

SEQ ID NO: 3278 - protein, 43 aa, Artificial Sequence
  Synthetic
TTVHVNGVEYRFDEPEQAKKFVEKVAKDNQLKVEFHGDTVRVE

SEQ ID NO: 3279 - protein, 40 aa, Artificial Sequence
  Synthetic
SETYTFEGEEKARKMMKIAKAANLEAHIRIENGRWVVTVD

SEQ ID NO: 3280 - protein, 43 aa, Artificial Sequence
  Synthetic
NPEDEINKLREIIQRGGTVTLGNLTVTDEDEAREAFREWQRLQ

SEQ ID NO: 3281 - protein, 40 aa, Artificial Sequence
  Synthetic
DIEITVEGKEQADKVIEEMKRRNLEVHVEEHNGQYIIKAS

SEQ ID NO: 3282 - protein, 43 aa, Artificial Sequence
  Synthetic
TTVHMQGVQYDFNNPEEAKKMAEELAKKYQLKVEFHGDTIHID

SEQ ID NO: 3283 - protein, 41 aa, Artificial Sequence
  Synthetic
NTVRENGDEEQFSSEDEAQEEAEKRGAQRKRRKNGHWEFQK

SEQ ID NO: 3284 - protein, 43 aa, Artificial Sequence
  Synthetic
KTLHVGDTTYHFPTTKLAQEAAEYFAKQAGLEVQIHGNTIHVK

SEQ ID NO: 3285 - protein, 40 aa, Artificial Sequence
  Synthetic
AVTFEMHGEEQAKAVLEWAKKQNLNVEVQVHNGKFILHAS

SEQ ID NO: 3286 - protein, 43 aa, Artificial Sequence
  Synthetic
ITVHVDGVQYDFNNPEEVKKFAQKVAEEKNLTVEFHGNQVRVT

SEQ ID NO: 3287 - protein, 40 aa, Artificial Sequence
  Synthetic
REKYEVEGEELARRIAKMAKKRNLEVHVEIHNGKYIIQID

SEQ ID NO: 3288 - protein, 43 aa, Artificial Sequence
  Synthetic
KTVFVNGKEFHVTTDDELKSIVETWRKRLGVTVTEKDGQFHLS

SEQ ID NO: 3289 - protein, 40 aa, Artificial Sequence
  Synthetic
RITVETEGREAAEREMKKLKAQNLDVKVEIRGDKYILHAD

SEQ ID NO: 3290 - protein, 43 aa, Artificial Sequence
  Synthetic
TTIIVGNETYQFPNPEEAQKFAEKAAKKLGLDLQTHNGKFQLN

SEQ ID NO: 3291 - protein, 40 aa, Artificial Sequence
  Synthetic
SITITFDGQEQAIEAVKELKKQNLEAHIRVEGNKWVVTFD

SEQ ID NO: 3292 - protein, 40 aa, Artificial Sequence
  Synthetic
GITYEVHGEEQMKRLAEELKRRNLEVEVQIHNGKFVVTAH

SEQ ID NO: 3293 - protein, 40 aa, Artificial Sequence
  Synthetic
GWTYTVEGEEQAKRMAKKMKAMNLEVHIEVRNGKFIITAD

SEQ ID NO: 3294 - protein, 43 aa, Artificial Sequence
  Synthetic
RKEETLKEILKALKKGDRDRAKELAERLGISLDEAEKLAKEVG

SEQ ID NO: 3295 - protein, 43 aa, Artificial Sequence
  Synthetic
DEEKVKREVKKVLENGDEKRARELLRKAGVSEEEIEKILQRLV

SEQ ID NO: 3296 - protein, 43 aa, Artificial Sequence
  Synthetic
GTVKVGNTTYTAPSPEEAEKIAQKLAKKLGLQVTVKNGTWHVE

SEQ ID NO: 3297 - protein, 40 aa, Artificial Sequence
  Synthetic
ETTYKFTDKKAAEEFAQKLKDQGIPLEITQQNGTWQVTQK

SEQ ID NO: 3298 - protein, 43 aa, Artificial Sequence
  Synthetic
RKEDEKEKAKEAYRRGDEDTAENILRKLGVSEEEAERVKKEAN

SEQ ID NO: 3299 - protein, 43 aa, Artificial Sequence
  Synthetic
GTVHVNGKKYTFPTPELAEKFAQEVANKYNLTVKKNGDTVKVE

SEQ ID NO: 3300 - protein, 40 aa, Artificial Sequence
  Synthetic
GITWHMNGEEQLKRIIEMAKKRNLRIEVRREGDQWILTAD

SEQ ID NO: 3301 - protein, 43 aa, Artificial Sequence
  Synthetic
DDRVVEIVERLKKNGVSPDQIEEVLRRNNISDEQIKDAKRKVM

SEQ ID NO: 3302 - protein, 43 aa, Artificial Sequence
  Synthetic
TTVHVNGVTYHFPNPEEAKKFVDRVVKEAGLTVEVKGNQWDVE

SEQ ID NO: 3303 - protein, 43 aa, Artificial Sequence
  Synthetic
RDTEKRLRKIAQKVGGDAERIAEELIKNGVSPDEIEEILRRIL

SEQ ID NO: 3304 - protein, 43 aa, Artificial Sequence
  Synthetic
SEESKKVAEELQRRGVSPDEAKKRAKELGYDEEQAERIRQLVA

SEQ ID NO: 3305 - protein, 43 aa, Artificial Sequence
  Synthetic
DQEEAKRLIKEALDNGNRDLAEELAQRAGLSPKEARDLLKKVE

SEQ ID NO: 3306 - protein, 43 aa, Artificial Sequence
  Synthetic
DEKLIKEVRKLQRNGVDERQVEKYLQDQGVDDRQIEEIKKKLK

SEQ ID NO: 3307 - protein, 43 aa, Artificial Sequence
  Synthetic
TTVHVGNYTYHFENPEKAEKFAQEMAKKLGMTIEVKNDTIHVE

SEQ ID NO: 3308 - protein, 43 aa, Artificial Sequence
  Synthetic
SKQEAKDKAEEAIRRGDTDKARELLERAGIDPDEAERIIQEIK

SEQ ID NO: 3309 - protein, 40 aa, Artificial Sequence
  Synthetic
TYTYTVTDQEEAKKWAEWAKKQGLTVTITERNGTVEVRVD

SEQ ID NO: 3310 - protein, 43 aa, Artificial Sequence
  Synthetic
GEDAQKIADEVEKKNLKQITINGQDFSASSPRELAELVYKFLE

SEQ ID NO: 3311 - protein, 43 aa, Artificial Sequence
  Synthetic
VTVDVNGLTYTFSSPEQMKEFVRKVVEKKGLKVEYHGNTVKVE

SEQ ID NO: 3312 - protein, 43 aa, Artificial Sequence
  Synthetic
LVKELLQKAAKKGIEVTVTFGNITLHLKPGDTQAADELAKKYF

SEQ ID NO: 3313 - protein, 43 aa, Artificial Sequence
  Synthetic
TDDEKKYLAKLLLNGAETVTLNGLKFTFDTDQKAKEWAKKVLN

SEQ ID NO: 3314 - protein, 43 aa, Artificial Sequence
  Synthetic
TPDDAQKAWEAIQKGQPITVNGVEVRPGSPAAKEWERQYKELF

SEQ ID NO: 3315 - protein, 43 aa, Artificial Sequence
  Synthetic
DEELEKKAKRLWKNGVDPRDVERVLREAGVSDEEIKEIKKKLS

SEQ ID NO: 3316 - protein, 43 aa, Artificial Sequence
  Synthetic
DEEVEKLVREIKEKNVTRVTINGETYQVSSVDEVVEIVRRLLS

SEQ ID NO: 3317 - protein, 40 aa, Artificial Sequence
  Synthetic
TTTFTVDDPKQAEQVAKKFKKQGKEVHVKQHGNRIKITVH

SEQ ID NO: 3318 - protein, 43 aa, Artificial Sequence
  Synthetic
TYLAKLAKEALKKGKGITINFNGQTFKITSQDEAKKAIEIAEK

SEQ ID NO: 3319 - protein, 43 aa, Artificial Sequence
  Synthetic
GTVHVNGKTFHAPSAEAAKKIAQKLAEKYNLTVYQHGNTYRLE

SEQ ID NO: 3320 - protein, 43 aa, Artificial Sequence
  Synthetic
PKEVAKAALKAAKNGIPQVQVGNFTYTAPSPDALAKWAKKVLN

SEQ ID NO: 3321 - protein, 43 aa, Artificial Sequence
  Synthetic
EEEVKKLVEEVRRKGLSEKQIREELKKQGVSDEQVEKVVRLVS

SEQ ID NO: 3322 - protein, 43 aa, Artificial Sequence
  Synthetic
KKVILNGKTYTFPTPELAQKFAEEAAKKLNLTVEVHGNYIKVT

SEQ ID NO: 3323 - protein, 43 aa, Artificial Sequence
  Synthetic
QDKELEIAARAYQNNTTLEINGKRFSATSREAEEAWKEWQRRQ

SEQ ID NO: 3324 - protein, 40 aa, Artificial Sequence
  Synthetic
EETYTVEGEEKARRLMKELKKKNLEVHVEKHNGKFIVHAH

SEQ ID NO: 3325 - protein, 40 aa, Artificial Sequence
  Synthetic
TKTIEVDDRTEAERVRKELEKKGLTVKTTEENGRWRVEST

SEQ ID NO: 3326 - protein, 43 aa, Artificial Sequence
  Synthetic
TVDEAIQRAKEEGKPLEFTVNGVRIQVEPGNEQQAREAYKKAL

SEQ ID NO: 3327 - protein, 43 aa, Artificial Sequence
  Synthetic
TKAEELAKKALKKGTELTLTVNGITFTIHSQEAAKYAIKLAQK

SEQ ID NO: 3328 - protein, 43 aa, Artificial Sequence
  Synthetic
PEEELRRELEKARKNGDKDKVEELLKRLGYDERQVRKVVKEVS

SEQ ID NO: 3329 - protein, 43 aa, Artificial Sequence
  Synthetic
LQVDVGNVTYTFNSPEEVLKFAEEMAKKLGLQVHVHGNKVRVE

SEQ ID NO: 3330 - protein, 43 aa, Artificial Sequence
  Synthetic
VKVHVNGVTYEFSNPEEAKKLAEEIAKKLGLTWDIKDGHIQVE

SEQ ID NO: 3331 - protein, 43 aa, Artificial Sequence
  Synthetic
LKVQVGNVEYTFNNPEEVKKFIEEVARKKGLQVEYKDGTFQMK

SEQ ID NO: 3332 - protein, 40 aa, Artificial Sequence
  Synthetic
SYQYTVDGEEQAHKVMKMLKNRNLNARIRVENGKYIIQAD

SEQ ID NO: 3333 - protein, 40 aa, Artificial Sequence
  Synthetic
TETYKTTDPENAKEVAQRLKDKGLKVEVREHNGKWEVRST

SEQ ID NO: 3334 - protein, 43 aa, Artificial Sequence
  Synthetic
RTLHVGNVTYHFDNPEEVEEVAKKLAKTYQLQIHMKDGTIEFK

SEQ ID NO: 3335 - protein, 43 aa, Artificial Sequence
  Synthetic
DEAQEILERLAKELNVDPEQVLKWAEDQNDERTVRLIRKVLKS

SEQ ID NO: 3336 - protein, 43 aa, Artificial Sequence
  Synthetic
SKEEIKRLAEELLKNYSPDEVRRILEELGVDPDVAEEVLQELT

SEQ ID NO: 3337 - protein, 43 aa, Artificial Sequence
  Synthetic
STVKINTQTYTLPSTKAAQEFAKKLAKELGLEVQVHGHTIEVH

SEQ ID NO: 3338 - protein, 43 aa, Artificial Sequence
  Synthetic
DVDEIVKKVEELVKNGQPITVNGINVTTEEQVKKLEEYLRKHQ

SEQ ID NO: 3339 - protein, 43 aa, Artificial Sequence
  Synthetic
TTVTLGDIEIHVTSPDEAKKIAKKLAEKFNLTFTKVNGRFKIE

SEQ ID NO: 3340 - protein, 43 aa, Artificial Sequence
  Synthetic
TTVHVGNKTYHFNNPEEVKKFVTEVARKLNLEVETRGNEIHVK

SEQ ID NO: 3341 - protein, 40 aa, Artificial Sequence
  Synthetic
DITIEVHGEEQAKKIMKEAKDRNLEVRVENHNGKYIVHIR

SEQ ID NO: 3342 - protein, 43 aa, Artificial Sequence
  Synthetic
KTVDVKGVTYHFDNPEQAKQFAEEMAKRLNGTYEIHGDTIKVD

SEQ ID NO: 3343 - protein, 43 aa, Artificial Sequence
  Synthetic
QEEARQIAEKLARNGVSPDEIKEEAKKRGLDPRVIEEVIQKLF

SEQ ID NO: 3344 - protein, 43 aa, Artificial Sequence
  Synthetic
TEEVEKKVKELLDRGLSPDDVKDTLRRQGIDPREVEEAIRRVL

SEQ ID NO: 3345 - protein, 43 aa, Artificial Sequence
  Synthetic
SQRELAKQALEALDRGDQDRVDELAKKANLSPEDIKELVKELK

SEQ ID NO: 3346 - protein, 40 aa, Artificial Sequence
  Synthetic
RTKITITNEEEAKKLAEKLRRNGLTVDLQRDGTTFTIEVE

SEQ ID NO: 3347 - protein, 43 aa, Artificial Sequence
  Synthetic
NDKAEEALREAQEKNLSEEQLREILERLGVSPEDAERARKKYR

SEQ ID NO: 3348 - protein, 43 aa, Artificial Sequence
  Synthetic
VQVEVDGVTYKFDNPEKAKKFAEEMARRKNGTYELKDGTFRVE

SEQ ID NO: 3349 - protein, 41 aa, Artificial Sequence
  Synthetic
RTLTVNGQTYTFTSETEAEEWAKRAGARRWTTDGTTVTVEK

SEQ ID NO: 3350 - protein, 43 aa, Artificial Sequence
  Synthetic
GEVHVNGVTYHFETLEQAKQFAAEMAKTYNLRLEIHNGTIHVE

SEQ ID NO: 3351 - protein, 43 aa, Artificial Sequence
  Synthetic
DEEELKDQVRKAQENKDKDRVREILERLGYSPEEVQRIIDNVL

SEQ ID NO: 3352 - protein, 43 aa, Artificial Sequence
  Synthetic
PEDAKKNAEELLKKGESPESAREYLERAGYSPEQARRILDKLN

SEQ ID NO: 3353 - protein, 43 aa, Artificial Sequence
  Synthetic
EETTKRAQELLKKAGGNREKLRELLERAGYSEDEARELVKKAG

SEQ ID NO: 3354 - protein, 40 aa, Artificial Sequence
  Synthetic
GETYQMDGEEAAIKFIRHMQARNLEVHWEVHGDHVIITVH

SEQ ID NO: 3355 - protein, 43 aa, Artificial Sequence
  Synthetic
IEEVKKVRERVKKQQLSEEQVQELLERAGLDPREVKKLVKKLS

SEQ ID NO: 3356 - protein, 43 aa, Artificial Sequence
  Synthetic
SEKAKQLAEELLRRGVSPEEIRQIAESQGINPEEAKQALEELL

SEQ ID NO: 3357 - protein, 40 aa, Artificial Sequence
  Synthetic
TYTYKFDDKREADRAAEEWRRRGYDVRVTKVGTTWKVESE

SEQ ID NO: 3358 - protein, 43 aa, Artificial Sequence
  Synthetic
TTVKIGDETYTADTDETAEKIAQKLAKKFNATVTKHNGTFQVH

SEQ ID NO: 3359 - protein, 43 aa, Artificial Sequence
  Synthetic
SDDEKRTREFAKELNIDPEQAKEALKKANGDEDKAREIVKRKG

SEQ ID NO: 3360 - protein, 43 aa, Artificial Sequence
  Synthetic
SEDTAKKLLKLLKKGIETTWNGIKFTPSNPEAIKLAQKLIKQK

SEQ ID NO: 3361 - protein, 43 aa, Artificial Sequence
  Synthetic
TEVTLGDKRIQVSSPEEAQKLAQKLAKKLGLEVHIHGNKVTVQ

SEQ ID NO: 3362 - protein, 43 aa, Artificial Sequence
  Synthetic
TPKAEEIARRLLENGVSPEQVREELERRGVNPEEARKAAERAK

SEQ ID NO: 3363 - protein, 43 aa, Artificial Sequence
  Synthetic
DDDAVKHIQTLFKNGVTHVTINGQTYRIDTEEDLKTVVKKLKS

SEQ ID NO: 3364 - protein, 43 aa, Artificial Sequence
  Synthetic
KTLTNGNTTLHFDTPEAAIKKAKKLAKEYNLEVQVHGNTITVQ

SEQ ID NO: 3365 - protein, 43 aa, Artificial Sequence
  Synthetic
PEEVKRLLDELKRQGIDDRQVREILKQQGISEEEVREAERQYL

SEQ ID NO: 3366 - protein, 43 aa, Artificial Sequence
  Synthetic
TTVIVGDETYTFDTEDKAKKYAQEAADKLGADLQLTNGTFHLH

SEQ ID NO: 3367 - protein, 43 aa, Artificial Sequence
  Synthetic
GTVEVGNTTYTAPSPEAAYKIALKLAKEYNLTVRLHGTTVKLT

SEQ ID NO: 3368 - protein, 43 aa, Artificial Sequence
  Synthetic
TDDEAKKEFKKALQSGNEDKAREIAKKLGLSPDEAEQAKKEWI

SEQ ID NO: 3369 - protein, 43 aa, Artificial Sequence
  Synthetic
KTVHVNGQKITVDNPQKAKKIAEYFAKKYNLTVTVENNTFHVS

SEQ ID NO: 3370 - protein, 43 aa, Artificial Sequence
  Synthetic
GTVHVGDITVHVPNPEKARKIAQELAKKYNLTVHIKGNEVKVE

SEQ ID NO: 3371 - protein, 40 aa, Artificial Sequence
  Synthetic
EIQYETDGEEDAKRVKKILEAKNLKVEVEIHGDKIILHAK

SEQ ID NO: 3372 - protein, 43 aa, Artificial Sequence
  Synthetic
KTVHVQGQEYRFDNPEEVEKFVKKVVKDLGLSIEQRGDTFHVS

SEQ ID NO: 3373 - protein, 43 aa, Artificial Sequence
  Synthetic
ITVEVNGVKYTFNNPEEAKKFAEKVAKELQREVHIKDGTIQIK

SEQ ID NO: 3374 - protein, 43 aa, Artificial Sequence
  Synthetic
PPEAAKKALKAVQKGKKFQYNGLTFEPGNEEAAKLAKKLIKKL

SEQ ID NO: 3375 - protein, 43 aa, Artificial Sequence
  Synthetic
TTVEINGQKYTFDNPDQAKKFAEKAAKKAGLTVTKLGNSFKVE

SEQ ID NO: 3376 - protein, 43 aa, Artificial Sequence
  Synthetic
QQVKYNGVTLTFDNPEAAKKAAQKAAKKYNLTYTVHGNTVEVH

SEQ ID NO: 3377 - protein, 43 aa, Artificial Sequence
  Synthetic
VTVHVGNVTYHFSNPEEAKRFAEEVAKTLGLEMQVHNGEFHIK

SEQ ID NO: 3378 - protein, 40 aa, Artificial Sequence
  Synthetic
TETYQWTDKREAEKAAREFAKRGYTVRVTKENGTFKVEVE

SEQ ID NO: 3379 - protein, 43 aa, Artificial Sequence
  Synthetic
KQVTFNGTTITFPSPEAARQAAKKIAKKLGLQVHIDGNQVTIT

SEQ ID NO: 3380 - protein, 43 aa, Artificial Sequence
  Synthetic
SSDKSEEELKRLANNGNEEKAKEEAKRRGDEEALRRLEKYLKY

SEQ ID NO: 3381 - protein, 43 aa, Artificial Sequence
  Synthetic
SDEAKERARQLLKNGVSPEEIKRILDKLGDSEAKEQWERELRT

SEQ ID NO: 3382 - protein, 43 aa, Artificial Sequence
  Synthetic
TSEKWKKAAQLLREGKPVTIDGENLSPTDPEALRRAEEEAKKG

SEQ ID NO: 3383 - protein, 43 aa, Artificial Sequence
  Synthetic
HTVTVNGTTYTSPDAKYLIELAQKLAKKLGLTVTVRGNHVHVE

SEQ ID NO: 3384 - protein, 40 aa, Artificial Sequence
  Synthetic
EIHLTFDGEEQAERAIREAKNRNLEVHVEIHNGKFIVTLR

SEQ ID NO: 3385 - protein, 43 aa, Artificial Sequence
  Synthetic
ATVHVNGVQYDFSSPEQAKEFADKMARKLNLTYEIHGDTVHVK

SEQ ID NO: 3386 - protein, 43 aa, Artificial Sequence
  Synthetic
STVIINGQKFTLPSPKAAKELAEKLAKIYNATLHIKNGEFHVT

SEQ ID NO: 3387 - protein, 43 aa, Artificial Sequence
  Synthetic
PEDELRNRAKEARKRGDTERIKKLLQKAGYSDEEAEKIAQKLK

SEQ ID NO: 3388 - protein, 43 aa, Artificial Sequence
  Synthetic
TDDKKEEAWRRLQNGEPVDVDGQEIRPGSPRAKELDRWWREQR

SEQ ID NO: 3389 - protein, 40 aa, Artificial Sequence
  Synthetic
TFEVTVTDKREAERAAQEWKDLGYTVRIERDGTTWRLEVR

SEQ ID NO: 3390 - protein, 40 aa, Artificial Sequence
  Synthetic
KEKLEVSGEEQMRRAVEMAKKRNLKVTVKIHGDKIILELE

SEQ ID NO: 3391 - protein, 43 aa, Artificial Sequence
  Synthetic
QTLHVNGVEYNFSNPEEAKKFAEEVARKLGGTYQIKDGKIHIE

SEQ ID NO: 3392 - protein, 40 aa, Artificial Sequence
  Synthetic
EYHWTVEGEEQMHHAVKEAKERNLEVHWRKENNQWIITAK

SEQ ID NO: 3393 - protein, 43 aa, Artificial Sequence
  Synthetic
TDDDLEKAYRAVKNNQEVTVNGLRVRAGSETAKELERKWRERF

SEQ ID NO: 3394 - protein, 43 aa, Artificial Sequence
  Synthetic
TDVDVNGVTYHFNNPEEVKKFVDEVAKKLGLQVHFHGEKIRIE

SEQ ID NO: 3395 - protein, 43 aa, Artificial Sequence
  Synthetic
LWAKKALEAIRAGKTLTLHVNGKKIDVQPNNEELKKKLEKIVY

SEQ ID NO: 3396 - protein, 43 aa, Artificial Sequence
  Synthetic
SIEELQRRAKEAARKGEPIRLGNLEVSSPEEAKKAIEELERRR

SEQ ID NO: 3397 - protein, 43 aa, Artificial Sequence
  Synthetic
PAEDRERLAEEALRKHRPVTIDGKTYTDETQIEKILREAKKER

SEQ ID NO: 3398 - protein, 43 aa, Artificial Sequence
  Synthetic
KDKARKIVEEAIRNNLSPDQINKYAKSQGVNPEEAQRILDEIF

SEQ ID NO: 3399 - protein, 43 aa, Artificial Sequence
  Synthetic
LTVHVDGLTYHFSSPEQALRFAEELAQKQNRTYELHNGQIHIE

SEQ ID NO: 3400 - protein, 43 aa, Artificial Sequence
  Synthetic
TLEKLEDILKKAAKNNEPVTVNGITVTTQDQAKKAIKWLQEAF

SEQ ID NO: 3401 - protein, 43 aa, Artificial Sequence
  Synthetic
IEKVERIAQELRKNGYSEEEIKKILKKLGVSEEQIKRAEENLR

SEQ ID NO: 3402 - protein, 40 aa, Artificial Sequence
  Synthetic
GYTYTVDGQEAAKKAIEMARRMNLSYEIEHHGNQIIIHLK

SEQ ID NO: 3403 - protein, 43 aa, Artificial Sequence
  Synthetic
TEEDARRKAIKAWEKGDDDKIKELAERANLDPEELKELAKKVF

SEQ ID NO: 3404 - protein, 43 aa, Artificial Sequence
  Synthetic
PEEELRKRAEKAKKNGNFKEARKYAQLAGDRELEERIEREERN

SEQ ID NO: 3405 - protein, 43 aa, Artificial Sequence
  Synthetic
TTVHVNGQEYRFDTDEQVEKFVKDIVKKLNVTVEKHGKTFHVS

SEQ ID NO: 3406 - protein, 43 aa, Artificial Sequence
  Synthetic
DERVDKIVKKLKDNNVESVEVNGKKIDLNSEEVYKEVAKLLVS

SEQ ID NO: 3407 - protein, 40 aa, Artificial Sequence
  Synthetic
TQTYTFNDKKQAQKAAEELKKKGLDVKLTQHNGQWKVHSH

SEQ ID NO: 3408 - protein, 43 aa, Artificial Sequence
  Synthetic
SEDEKLIRKISKKYNLSPEQAERIARKANGNPEKAEKIAKKVG

SEQ ID NO: 3409 - protein, 40 aa, Artificial Sequence
  Synthetic
RETYTVTDPKQAKEWIKRAQKNGIEVHVTRHGDKLEVTIK

SEQ ID NO: 3410 - protein, 43 aa, Artificial Sequence
  Synthetic
KTVEVNGKKYTFPNPEKAKKFAEKAAKEYGLTVTLKNGTFHVE

SEQ ID NO: 3411 - protein, 40 aa, Artificial Sequence
  Synthetic
TTTTRVTDPEEARRIEEELRRRGYTVHVRKDNGEFEITVK

SEQ ID NO: 3412 - protein, 43 aa, Artificial Sequence
  Synthetic
DKKEAKKKAKELLEKGNEEEVERVLKEAGVSDEEVKRIRDELL

SEQ ID NO: 3413 - protein, 43 aa, Artificial Sequence
  Synthetic
QTVHVGNTTYHFDTPEKAKKFAQKIAKKNNLTVEEHGDTVTVQ

SEQ ID NO: 3414 - protein, 40 aa, Artificial Sequence
  Synthetic
TTTTTVTDRRKAEEIRREAEERGLDVEVRKRNGHWEVRIG

SEQ ID NO: 3415 - protein, 43 aa, Artificial Sequence
  Synthetic
SERQKEEAARRLLKGEPVTINGEEYRPDDPEARKLAEKYRQDA

SEQ ID NO: 3416 - protein, 40 aa, Artificial Sequence
  Synthetic
QIDITVHGEEQAKRVYKMAADRNLEAEVHVHGDQIVIHIK

SEQ ID NO: 3417 - protein, 43 aa, Artificial Sequence
  Synthetic
SEDAKRTAEKLYRNGKNPDEIKKILEKIGVSPDEAEKARQSLF

SEQ ID NO: 3418 - protein, 40 aa, Artificial Sequence
  Synthetic
SYEYHVEGEEKARKIYKMLAKANLDVKIEIHGDRAVIQAS

SEQ ID NO: 3419 - protein, 43 aa, Artificial Sequence
  Synthetic
GTVHVNGTTIQFPTTDKAIKFAQKLAEKLNLTLKVDGNELTIH

SEQ ID NO: 3420 - protein, 43 aa, Artificial Sequence
  Synthetic
VEDLRQLAEQLLKNGLSDDQIRKILQKLGVSDEEADQAIKEAQ

SEQ ID NO: 3421 - protein, 43 aa, Artificial Sequence
  Synthetic
TEVHMGNLTWTFSNPEEAEEFAKKMAKKANMEVQLHGDHFEVE

SEQ ID NO: 3422 - protein, 43 aa, Artificial Sequence
  Synthetic
SEEAKKIIEELLRRNVSDDKIEETRERLGLSSSEAKKLRKKVG

SEQ ID NO: 3423 - protein, 43 aa, Artificial Sequence
  Synthetic
QTIHVNGQTYHIPDPTQVKRFVEKLARDLGLRVETHGDTLHVS

SEQ ID NO: 3424 - protein, 43 aa, Artificial Sequence
  Synthetic
ITVQFNGYEYHFNNPEEAKKFAAEVAKKLNGEVKLKDGTMRIE

SEQ ID NO: 3425 - protein, 43 aa, Artificial Sequence
  Synthetic
ITVEFNGYQYHFSTPEEVAKFAQKVAEELGGEVKWKGDTVQIE

SEQ ID NO: 3426 - protein, 40 aa, Artificial Sequence
  Synthetic
SITYHMNGEEKARKIVKMLKKQNLNVKVEVHNGQWIVHAD

SEQ ID NO: 3427 - protein, 43 aa, Artificial Sequence
  Synthetic
PPDEARERIKQAIKEGNEDKAQQIAKEAGLSDEDLKKIKKELG

SEQ ID NO: 3428 - protein, 40 aa, Artificial Sequence
  Synthetic
TLTLGTNTYTFRSLTEAIEWAKRYGATTITVDGTTVTVQE

SEQ ID NO: 3429 - protein, 43 aa, Artificial Sequence
  Synthetic
STVHLGDITYHASSPEEAQKIAEKLAKIYGLQYTVHGKEVQVH

SEQ ID NO: 3430 - protein, 43 aa, Artificial Sequence
  Synthetic
NEELKKIAEQLAREGVKEIHIGPITIQIDDLEQAREVAEKAAA

SEQ ID NO: 3431 - protein, 43 aa, Artificial Sequence
  Synthetic
NKVEVQGEQYQFPTPEKAKKFAEEAAKKYNLKITEKNGVFHVE

SEQ ID NO: 3432 - protein, 40 aa, Artificial Sequence
  Synthetic
EEQITVHGEEQAKKAVELAKKRNLEAEVHRDGDQIVITLK

SEQ ID NO: 3433 - protein, 43 aa, Artificial Sequence
  Synthetic
SEEKAKREAEKAIRNGNNEKARKILESAGLSTDEAKKVIEKLR

SEQ ID NO: 3434 - protein, 43 aa, Artificial Sequence
  Synthetic
STVEFQGTKYTAPSPEAAKEYAKKAAKKYNLTVHIHGDTITLK

SEQ ID NO: 3435 - protein, 40 aa, Artificial Sequence
  Synthetic
KITFHVEGEEQMKRVIKIAKKQNLTVRYERHGDQAVIHVE

SEQ ID NO: 3436 - protein, 43 aa, Artificial Sequence
  Synthetic
KTVHVNGKTYHFSSDEEVKKFVETLVRRLNVTYEEHNGQIHLS

SEQ ID NO: 3437 - protein, 43 aa, Artificial Sequence
  Synthetic
TQVRSGDTTYTFPTPEEAQEFAEKYAKKKGLTVHKKGNFFEVH

SEQ ID NO: 3438 - protein, 40 aa, Artificial Sequence
  Synthetic
TKEIKVTKKEEAKKVAQYYKDLGKDVEVKKVNGTYVVHVG

SEQ ID NO: 3439 - protein, 43 aa, Artificial Sequence
  Synthetic
SPDLAEALKKAAKNNLTHVTVNGVTFHVSSPEELKKIIQKLLN

SEQ ID NO: 3440 - protein, 43 aa, Artificial Sequence
  Synthetic
PPALKEAQELLKKGKPYQYTINGQTVTVTTEEAAKYLAQLLKN

SEQ ID NO: 3441 - protein, 43 aa, Artificial Sequence
  Synthetic
TTVRVNGVDYDFPNPELMEKFAKKVAKELGLRVELHGNTVHVE

SEQ ID NO: 3442 - protein, 43 aa, Artificial Sequence
  Synthetic
DEEDVQSIVTELKKKGQTVTVDGQEYHDEEELKEVVRKQLKKL

SEQ ID NO: 3443 - protein, 43 aa, Artificial Sequence
  Synthetic
DEQDKVEELVRKGGEFTVTINGTTFQFDPGDEDKVKELLKQVK

SEQ ID NO: 3444 - protein, 43 aa, Artificial Sequence
  Synthetic
LTVNVENYTYTFNNPEQVEKFAKEMAKKLGLKVEFHGDTVRVE

SEQ ID NO: 3445 - protein, 40 aa, Artificial Sequence
  Synthetic
KMTVETHGEEDAKRLIELAKKRNLEVTYEKHGDKIVVHFH

SEQ ID NO: 3446 - protein, 43 aa, Artificial Sequence
  Synthetic
ETDTLEELKERLKRKGDNETIKRLKEAEKKNPEDAERLAKKIM

SEQ ID NO: 3447 - protein, 43 aa, Artificial Sequence
  Synthetic
SESDKIKKLLDRANNGDESAKKLYEEIVKKNEKRKRIAEKLRG

SEQ ID NO: 3448 - protein, 40 aa, Artificial Sequence
  Synthetic
GETRRFTDKNEATRFKEEAERRGLNVELRRDGTQWTVRVE

SEQ ID NO: 3449 - protein, 40 aa, Artificial Sequence
  Synthetic
TTTYTVTDEREARKWEKEVKDRGREVEIRNNNGTWEVRVE

SEQ ID NO: 3450 - protein, 40 aa, Artificial Sequence
  Synthetic
SETITVDGEEKAKRIYEEAQKRNLEVHVTVENGQFILHIH

SEQ ID NO: 3451 - protein, 43 aa, Artificial Sequence
  Synthetic
TPDEVEREAKEAVRRGEPYTYDGYTITDEDEAKKLADELRRRE

SEQ ID NO: 3452 - protein, 43 aa, Artificial Sequence
  Synthetic
GTVHVGDKTFNFDTPEKAKKFAEQVAKELGLKVTETNGQFKVH

SEQ ID NO: 3453 - protein, 40 aa, Artificial Sequence
  Synthetic
SWTFHTNGEEQAKKVIDWAKAHNLEVHVEVRNGQIIIHAH

SEQ ID NO: 3454 - protein, 40 aa, Artificial Sequence
  Synthetic
TIELTYTDRTNAETAKKEAEKRGYDVQLRKHNGKWRLELN

SEQ ID NO: 3455 - protein, 43 aa, Artificial Sequence
  Synthetic
PRDELKERIERKLREGKKVTVAGITITSKEEAERALRELEKQS

SEQ ID NO: 3456 - protein, 43 aa, Artificial Sequence
  Synthetic
STEEALRKAQRALKEGKPITINGVELRSKEEARQLAEKLKKEL

SEQ ID NO: 3457 - protein, 43 aa, Artificial Sequence [sequence omitted]

SEQ ID NO: 3458 - protein, 40 aa, Artificial Sequence
  Synthetic
TTTYTVTDPREAKKLQEEAKKRGLRVETRREGTKWHVRVE

SEQ ID NO: 3459 - protein, 43 aa, Artificial Sequence
  Synthetic
STLTVGNTQFTFPSPDAAKKAAEEWAKKLGLTVKEKNGNFKVT

SEQ ID NO: 3460 - protein, 43 aa, Artificial Sequence
  Synthetic
DLEEKVKKVETVLKNNQPVTLDGKTITDPNEIKEILERLRKKI

SEQ ID NO: 3461 - protein, 43 aa, Artificial Sequence
  Synthetic
VTVHVNGLTYHFDNPEAAKKFVEEMAQKLNRTYEIHGNEIHVE

SEQ ID NO: 3462 - protein, 40 aa, Artificial Sequence
  Synthetic
TERYTFDDERQAREFIKRAQKNGLTVTVTETNGRFTVERR

SEQ ID NO: 3463 - protein, 40 aa, Artificial Sequence
  Synthetic
DITFHVHGEEQLKRVVKEMKARNLEVEIQVHGDQWVVHAR

SEQ ID NO: 3464 - protein, 43 aa, Artificial Sequence
  Synthetic
TTVHLGNYTIQADNTSKAAKLAKKYAKQYNLTVHVHGNTIKVK

SEQ ID NO: 3465 - protein, 40 aa, Artificial Sequence
  Synthetic
TKTYTFDDEREARKFANEAKKRNLTVRVETSNGTVKVELR

SEQ ID NO: 3466 - protein, 40 aa, Artificial Sequence
  Synthetic
EIQFEVHGEEVLKKAIKIAKDANLKVEVEVHNGQYIVKAK

SEQ ID NO: 3467 - protein, 40 aa, Artificial Sequence
  Synthetic
TQKITVHDQEEAKKWQEYAKKHNLKVEIQTHGDQFTVHLK

SEQ ID NO: 3468 - protein, 40 aa, Artificial Sequence
  Synthetic
SIDFEFEGEEKARAFVEAMRRQNLTAKLQVHNGKYIVTIE

SEQ ID NO: 3469 - protein, 43 aa, Artificial Sequence
  Synthetic
TTVEVNGIEVHFDNPEEVEKFAKEVAKKLNLEIQFHGNTVHVR

SEQ ID NO: 3470 - protein, 40 aa, Artificial Sequence
  Synthetic
SITYTVNGEEQAKRLAEELKRRNLTVEIEIHGDQIVIKAK

SEQ ID NO: 3471 - protein, 43 aa, Artificial Sequence
  Synthetic
GEVHVNGQTYHFPTDEEVRKFVEKVAKELGLQVHEKDGRFHLK

SEQ ID NO: 3472 - protein, 43 aa, Artificial Sequence
  Synthetic
LEAEQAAREAKKLNSTYKYGRVEFSASLSDDEEEKLKRKAKKQ

SEQ ID NO: 3473 - protein, 40 aa, Artificial Sequence
  Synthetic
KYQYTVDGEEKARKVYEHLARMNLDVKIKQENGKWVIEAE

SEQ ID NO: 3474 - protein, 40 aa, Artificial Sequence
  Synthetic
SVTYEFDGEEQARRFIEEMKKRNLEAEIHVHGDKVRVTVK

SEQ ID NO: 3475 - protein, 40 aa, Artificial Sequence
  Synthetic
TIHVTVTDEEAAQKVAQKWRNNGKDVQIQKKNGQFEIKVK

SEQ ID NO: 3476 - protein, 43 aa, Artificial Sequence
  Synthetic
QELHLGNVTWHFENPEKAKEVADKLAKTYQLKVEFHNGRVEFH

SEQ ID NO: 3477 - protein, 40 aa, Artificial Sequence
  Synthetic
TQRDRYTDKENAERAAREWKKRGYDVQITKNGNTWDVEWD

SEQ ID NO: 3478 - protein, 43 aa, Artificial Sequence
  Synthetic
PTDELHERAERALKEGNEDKARELLKQAGFSPEEIERVVRTYG

SEQ ID NO: 3479 - protein, 43 aa, Artificial Sequence
  Synthetic
GTVHVGNTTYHFPNPEEALKFAQKAAKKLNKKVTIKNGTVKVE

SEQ ID NO: 3480 - protein, 43 aa, Artificial Sequence
  Synthetic
KKVVSGNTTYTFPNPEEAEKYARKLAKKLGLQIEKHGNTYQLH

SEQ ID NO: 3481 - protein, 43 aa, Artificial Sequence
  Synthetic
VKEEEKKKAEKAARNGNRDRAEEILRRVGFSDQEIEDVYQRAK

SEQ ID NO: 3482 - protein, 43 aa, Artificial Sequence
  Synthetic
PDDDVKKDIKKYLDSGNEDKARKYAQKAGVDDRQWEKIRQELG

SEQ ID NO: 3483 - protein, 43 aa, Artificial Sequence
  Synthetic
ITVHVNGMEYHFDNPEEVKKFADEMAKRHNSQVEFRGNTVHIE

SEQ ID NO: 3484 - protein, 40 aa, Artificial Sequence
  Synthetic
KKTVRFEGEEKARAFVEEMKRRNLEVHVEKKNGKWEATVE

SEQ ID NO: 3485 - protein, 40 aa, Artificial Sequence
  Synthetic
SIQYTYDGEEKAKRAWEAFAKQNLDVKLEVHNGQYVVQID

SEQ ID NO: 3486 - protein, 43 aa, Artificial Sequence
  Synthetic
TTVKYKGVKVTFTTPDEAYKYAKKVAQKLNLTVEQHGNTVQVH

SEQ ID NO: 3487 - protein, 43 aa, Artificial Sequence
  Synthetic
TEEEEKKAKKEWKKTGSEDKAREILKKAGASPERIERIIRNLR

SEQ ID NO: 3488 - protein, 43 aa, Artificial Sequence
  Synthetic
GTVHVNGYTYHFNNPEEVVRFAQEVAKKLGLKVEVHGETVEVH

SEQ ID NO: 3489 - protein, 43 aa, Artificial Sequence
  Synthetic
TTVHLNGQTYTWNNTQYAYEWALELAKKLGLTVTIKGHTVKVK

SEQ ID NO: 3490 - protein, 43 aa, Artificial Sequence
  Synthetic
TQVHIGNTTYEFKTEEEVEKFVEKVVKKLGLKVEKHGDRFHVS

SEQ ID NO: 3491 - protein, 43 aa, Artificial Sequence
  Synthetic
TQDKREELKKLLKKNASKEEIKRTANKLGISEEEAEKVIRKAL

SEQ ID NO: 3492 - protein, 43 aa, Artificial Sequence
  Synthetic
PEELKKEIDRAIKEGQPLTWDGIEVRPGDDEAIRLAREAAERA

SEQ ID NO: 3493 - protein, 43 aa, Artificial Sequence
  Synthetic
DEDKETLKKEVEKGQQWTFHVNGQQYHVTDWKEVLKLLRKQKS

SEQ ID NO: 3494 - protein, 43 aa, Artificial Sequence
  Synthetic
PDEEITRRIKEALNQGDEDKARKLAKNAGYSEEQAERIIKKIL

SEQ ID NO: 3495 - protein, 40 aa, Artificial Sequence
  Synthetic
EQRYTYHGKEQADRALEEMKRRNLDVKLRVENGQYILHAR

SEQ ID NO: 3496 - protein, 40 aa, Artificial Sequence
  Synthetic
KVTYHVDGQEKAKELAKKLRAQNLEVHVEIRGDHIILHAE

SEQ ID NO: 3497 - protein, 43 aa, Artificial Sequence
  Synthetic
DEEEIAREVEDAQRKNDEEKLKEIVKKYNVSPEQLDRIVKKVL

SEQ ID NO: 3498 - protein, 43 aa, Artificial Sequence
  Synthetic
NTVHLNGIQIDFSSPEQAKKYAKEVAEKKNLRLELHNGQWHIE

SEQ ID NO: 3499 - protein, 43 aa, Artificial Sequence
  Synthetic
RDVAEKIRKKAEERGESDERLEKTLRKAGVSEEEIERVKRKAG

SEQ ID NO: 3500 - protein, 43 aa, Artificial Sequence
  Synthetic
LTVHVQGMQYHFDNPEEVEKFAEKMAKSLGLQIEWHGDTLRVE

SEQ ID NO: 3501 - protein, 40 aa, Artificial Sequence
  Synthetic
EIKIETHGEEQMKKVVKEMKKQNLEVEIHRHGDKFVLRVK

SEQ ID NO: 3502 - protein, 43 aa, Artificial Sequence
  Synthetic
SKEEAKKKAEEAIRRNNREKAERILRKAGVDPEEIRKILEEIG

SEQ ID NO: 3503 - protein, 43 aa, Artificial Sequence
  Synthetic
PAEELERRLREAVKKNQTVKVDGIEVTTEEAAERLAEEFRRRQ

SEQ ID NO: 3504 - protein, 43 aa, Artificial Sequence
  Synthetic
PPKLIQLAAEAFENNKEITVNGTTYKPGDEEAKKILEEFRKLL

SEQ ID NO: 3505 - protein, 43 aa, Artificial Sequence
  Synthetic
NTVHVNGVQYDFSSPEELKKFLEKMAKTYNLKVEYHGDTVHVE

SEQ ID NO: 3506 - protein, 43 aa, Artificial Sequence
  Synthetic
PLEELARKVEELARKGHPVTVNGQTFTDPEKARQFAEELKKRL

SEQ ID NO: 3507 - protein, 43 aa, Artificial Sequence
  Synthetic
ITVTVNGVQYDFPNPEKAREFAEKMAKKNNLQIQVHGNRIRVE

SEQ ID NO: 3508 - protein, 43 aa, Artificial Sequence
  Synthetic
TEDFERKARQLAKEGKPITLNGYTFPPGDWEKAVRLARKDEKN

SEQ ID NO: 3509 - protein, 43 aa, Artificial Sequence
  Synthetic
LTVHVNGVQYHFDNPEQVEKFVKELAKKLQREVRVDGNTWRVE

SEQ ID NO: 3510 - protein, 43 aa, Artificial Sequence
  Synthetic
TTIYVNGEKIDLPVSPKQAAEFAKKAFPDAEVQIHNGNIQVHQ

SEQ ID NO: 3511 - protein, 43 aa, Artificial Sequence
  Synthetic
DTVEKLRDEVKKKNRPITFHINGQEFHISDEEDVKRILKQLQS

SEQ ID NO: 3512 - protein, 43 aa, Artificial Sequence
  Synthetic
KPEEEKRKVQELLERGNEDKAKEVAKRAGISEDEYRELQKRAN

SEQ ID NO: 3513 - protein, 43 aa, Artificial Sequence
  Synthetic
SDQAEKDWKQAWKDGYSEDEASQIARDLGVTPEEVERIRRKFR

SEQ ID NO: 3514 - protein, 40 aa, Artificial Sequence
  Synthetic
SQKTRFTNEDEARKVAEKLRNKGLDVRVQEDNGTFEVEWE

SEQ ID NO: 3515 - protein, 43 aa, Artificial Sequence
  Synthetic
DDRVKDIVRRLLENGVDDDQVKKILQRQGVDDRQVKEAQRLVK

SEQ ID NO: 3516 - protein, 43 aa, Artificial Sequence
  Synthetic
SKEEIKRRAREAAKRGDEETARKLADKVNDEELKKEIEKLLTN

SEQ ID NO: 3517 - protein, 40 aa, Artificial Sequence
  Synthetic
TEKRRVTDPSEAEKARKSLQSSGDKVERTEDNGTWEVRRT

SEQ ID NO: 3518 - protein, 43 aa, Artificial Sequence
  Synthetic
DEHVRKIIESLVKSGVSHVTFNGRTYQIDDEETAKELIEKLDK

SEQ ID NO: 3519 - protein, 43 aa, Artificial Sequence
  Synthetic
LTVHVGNYTYHFNNPEEMKKFAEEVARKLNGQVHVHGNEIHIE

SEQ ID NO: 3520 - protein, 43 aa, Artificial Sequence
  Synthetic
PEDAKKIAEELKKRGVSKEEIKRILEKLGVSPEEAQRAAEYAD

SEQ ID NO: 3521 - protein, 43 aa, Artificial Sequence
  Synthetic
TTVQFNGKTFKFDTPEEAQKFAEKAAKKAGLQVKKKNGTWQLH

SEQ ID NO: 3522 - protein, 43 aa, Artificial Sequence
  Synthetic
TTVQWNGHEFHFETDEEVKKFVTEVARKLGLEVQKHGDTIQLH

SEQ ID NO: 3523 - protein, 40 aa, Artificial Sequence
  Synthetic
DETITVEGREQAERILEMAKRRNLEAEIHVEGNKWVVHLH

SEQ ID NO: 3524 - protein, 43 aa, Artificial Sequence
  Synthetic
TTVHMNGITYHFDNPEEARKFAEKMAKELNLEIKVKDGTFHIE

SEQ ID NO: 3525 - protein, 43 aa, Artificial Sequence
  Synthetic
STVTVNGIKYTAPNPEEAKKWAEEAAKKYNLTVKLENGTVTVE

SEQ ID NO: 3526 - protein, 43 aa, Artificial Sequence
  Synthetic
STLKVNGKKIKVDNWQEAEKLARKLAKKLGLTVHVKGNTVEVH

SEQ ID NO: 3527 - protein, 43 aa, Artificial Sequence
  Synthetic
TQVLVGNTKYTFDNPEEAKKFAEKAAKKANLTVTLTNGVFKVT

SEQ ID NO: 3528 - protein, 43 aa, Artificial Sequence
  Synthetic
KTVRWNGYEVTFNNPEQVKKYVERVVKELNLTVEFHGDTIHIE

SEQ ID NO: 3529 - protein, 43 aa, Artificial Sequence
  Synthetic
DEREERLIREFREKNIDREQVKKILQRRGVDDRQVEEIVKRVG

SEQ ID NO: 3530 - protein, 43 aa, Artificial Sequence
  Synthetic
DEDAERLARELKRSGVDPRQVEEILRKQGVDDEQIKIVKRVYK

SEQ ID NO: 3531 - protein, 40 aa, Artificial Sequence
  Synthetic
TTKYTVTNRTKAEQFAREIAKKGLDVRWTEDNGTFTVEVN

SEQ ID NO: 3532 - protein, 40 aa, Artificial Sequence
  Synthetic
QIDIRVEGPEQLKKVIEEAKRKNLEVHYTQHGDQYIITLH

SEQ ID NO: 3533 - protein, 43 aa, Artificial Sequence
  Synthetic
DKEKAKEEIKKALQSGNEDKARNIAKKAGLDPKVVDELKKELS

SEQ ID NO: 3534 - protein, 40 aa, Artificial Sequence
  Synthetic
SYTYETHGQEQAKHWIKIMKDMNLNVRIEVHNGKYVVTAD

SEQ ID NO: 3535 - protein, 43 aa, Artificial Sequence
  Synthetic
TTVDVNGNKYHFDNPEEVKKFVETVVKRLGVTWEQHGNTIHVS

SEQ ID NO: 3536 - protein, 43 aa, Artificial Sequence
  Synthetic
ATVHVKGVQYDFSNPEEAKKFVERMVKELGGTVEVHGDTWKVK

SEQ ID NO: 3537 - protein, 43 aa, Artificial Sequence
  Synthetic
LDIIKKAEELAKKGIEVHIHIGNVTFKITSPEAAQKALQKAKN

SEQ ID NO: 3538 - protein, 43 aa, Artificial Sequence
  Synthetic
SEEEKLRHVLELVKNNQPVTIDGRNVTDPNELKKLYEEVEKRV

SEQ ID NO: 3539 - protein, 43 aa, Artificial Sequence
  Synthetic
SQVLVNGTTYTFPSPEAAQKFAEEAAKEYNLTVTLKNGVFKVT

SEQ ID NO: 3540 - protein, 43 aa, Artificial Sequence
  Synthetic
GTVHLGNETYHFPTAEAAEKYAQKLAEERGLTLHIDGTRFEIH

SEQ ID NO: 3541 - protein, 43 aa, Artificial Sequence
  Synthetic
KTVEVDGVKYDFNNPEEMQKFVEKVAKTKGLQVEYHGDTIQIK

SEQ ID NO: 3542 - protein, 40 aa, Artificial Sequence
  Synthetic
TTTLTVTDRENAQRAATELKKLGLDVRLKEHNGEFRIEID

SEQ ID NO: 3543 - protein, 43 aa, Artificial Sequence
  Synthetic
PQELAKAALKAAKNNLTQVHYGNYTFQAESPDALAKWAKKVIG

SEQ ID NO: 3544 - protein, 43 aa, Artificial Sequence
  Synthetic
KTVVVNGKTITLPTPEAAQKVAEEAAKKFNLTVKDIGNYFRVE

SEQ ID NO: 3545 - protein, 43 aa, Artificial Sequence
  Synthetic
SQVKIGNTTYTFDSDEEAQKFAEEAAEKYNAQVELHNGTWTLK

SEQ ID NO: 3546 - protein, 43 aa, Artificial Sequence
  Synthetic
PSDEARKKVKELLKRGNEEEAERLAKEAGISDEEIKKIKKDVG

SEQ ID NO: 3547 - protein, 43 aa, Artificial Sequence
  Synthetic
TTIYSGDITVHVDTPEKAEKIAKKLAKIYNLTVHEKNGEFHLK

SEQ ID NO: 3548 - protein, 40 aa, Artificial Sequence
  Synthetic
TQTFTVDNQEEADQVAKKAKNNGLEVNIQKKNGKYHITVK

SEQ ID NO: 3549 - protein, 43 aa, Artificial Sequence
  Synthetic
PEAAKKAKKAIKNNQKVTLHINGITITITSQDEAKYAIKVAKN

SEQ ID NO: 3550 - protein, 43 aa, Artificial Sequence
  Synthetic
SQVELNGKTYTFKNPEEAQKFAEKAAKKLGLPVTLTNGTFKVK

SEQ ID NO: 3551 - protein, 40 aa, Artificial Sequence
  Synthetic
TETRTFTDRKQAEEFREEAERKGQTVQIHEHNGNFEVRRG

SEQ ID NO: 3552 - protein, 43 aa, Artificial Sequence
  Synthetic
TTVHVNGQQYHFESEEEVERFVKEVVKKLGLQVHKHGKTWEVK

SEQ ID NO: 3553 - protein, 43 aa, Artificial Sequence
  Synthetic
TKVTVQGKTVTFPTPEKAQEWAEKAAKKYNLKVEVHGNQITVT

SEQ ID NO: 3554 - protein, 41 aa, Artificial Sequence
  Synthetic
TTLEYNGRTWTFNTTEEAKEWAKRWGATTIHVSNGTLRVQE

SEQ ID NO: 3555 - protein, 43 aa, Artificial Sequence
  Synthetic
STVHVNGQTYHFPDPTEVKKFVKEVVKKLGVTWEDRNGEIHVS

SEQ ID NO: 3556 - protein, 43 aa, Artificial Sequence
  Synthetic
STLNLGDLTWTLDNPEKAKKLAKELAKKAGLTVHIDGDTVTIK

SEQ ID NO: 3557 - protein, 43 aa, Artificial Sequence
  Synthetic
TTVHVNNQTFQTDNTDEAYKLAKELAQKLGLKVTVENGEIHVE

SEQ ID NO: 3558 - protein, 43 aa, Artificial Sequence
  Synthetic
SSEEEERIWRAFKEDKTIEVNGEKFGPRDPKAEQIARDWEKKY

SEQ ID NO: 3559 - protein, 43 aa, Artificial Sequence
  Synthetic
DLEEQAKLAEEALKKGEPLTVGNTTWEDPRQVEKFLREVQNQL

SEQ ID NO: 3560 - protein, 40 aa, Artificial Sequence
  Synthetic
RITYTVHGEEQAKQLVEMAKKRNLSYEVHKKGDQIEVTIE

SEQ ID NO: 3561 - protein, 43 aa, Artificial Sequence
  Synthetic
STVEFNGQQYHFDDPNQVKKFVTEVAKKLNLEVHRHGDTWRVE

SEQ ID NO: 3562 - protein, 40 aa, Artificial Sequence
  Synthetic
TEEYTVDDEENARRLANEYKKLGLDVTIEDHNGEFRIKVG

SEQ ID NO: 3563 - protein, 43 aa, Artificial Sequence
  Synthetic
PEEKKNIRKIAKKLNASDEVWKEIEKLGLSEDEAEEYARRWLN

SEQ ID NO: 3564 - protein, 43 aa, Artificial Sequence
  Synthetic
SELEKKLRELVKKGQPIKVTVHGETYTVTSEEEAKRAAELLEK

SEQ ID NO: 3565 - protein, 43 aa, Artificial Sequence
  Synthetic
RTVDVDGVTYHFDNPEEAKKFAYEVAKKKNLQVEFHGEKIEVH

SEQ ID NO: 3566 - protein, 40 aa, Artificial Sequence
  Synthetic
EIQFDTHGDEQAKEAAKWAKAQNLEVHIEWHGDQLIVKVR

SEQ ID NO: 3567 - protein, 43 aa, Artificial Sequence
  Synthetic
DEDIERKVKELLKQGIDERQIKEDLKRQGVDEDEIRKALEKAR

SEQ ID NO: 3568 - protein, 40 aa, Artificial Sequence
  Synthetic
TLHITVEDPEEAKKVVKKYANQGKDVRVTQHGDKLTIEVN

SEQ ID NO: 3569 - protein, 43 aa, Artificial Sequence
  Synthetic
ITVDVDGVKYDFDEPEQAKKFAEKMARERNLKVEVHGNQIDVE

SEQ ID NO: 3570 - protein, 43 aa, Artificial Sequence
  Synthetic
WTVHVNGVQYDFDEPEQVKEFVEKMAKQLGSEVEWHGNTVHVK

SEQ ID NO: 3571 - protein, 43 aa, Artificial Sequence
  Synthetic
DPREIVKLFDEAKRKNDEDLQKELQDRLNVSDEELERFVRRVK

SEQ ID NO: 3572 - protein, 43 aa, Artificial Sequence
  Synthetic
KTVTFNGVEYHFSNPEEAKKLAEKLARTYNAEVHVHGDQIRVE

SEQ ID NO: 3573 - protein, 43 aa, Artificial Sequence
  Synthetic
QKKEIKEEILKAWQNNDDDRLREAAKLLGVSEDTAKEIAKRLT

SEQ ID NO: 3574 - protein, 43 aa, Artificial Sequence
  Synthetic
TKVKVGNIEVHVDNPEQAKKIALKIAKELNLPLTVKNGTWQVH

SEQ ID NO: 3575 - protein, 43 aa, Artificial Sequence [sequence omitted]

SEQ ID NO: 3576 - protein, 43 aa, Artificial Sequence
  Synthetic
TTVHIGNTTFHFDTTDKAQKYAEKAAKKLGLTVEVHGNTIQVH

SEQ ID NO: 3577 - protein, 43 aa, Artificial Sequence
  Synthetic
PEEVEKIIRHLLQNGVSPEQVTKIVKRHGVDEREIREVIRRIS

SEQ ID NO: 3578 - protein, 43 aa, Artificial Sequence
  Synthetic
PDEEAKDIARKVRESGTTFQYNGETYTSEEEVKEAAKRKLKED

SEQ ID NO: 3579 - protein, 43 aa, Artificial Sequence
  Synthetic
DIEELIRTLETVASKGGPVTVNGIEITSQEQVKKVVTELRRRL

SEQ ID NO: 3580 - protein, 40 aa, Artificial Sequence
  Synthetic
SFHITVDGEEAAKKVAKEMKDRNLNVEIQIHNGKYVIHAE

SEQ ID NO: 3581 - protein, 41 aa, Artificial Sequence
  Synthetic
TQLTINGTTYTFPTPKEAIEFALKVGATKVTVKNGDVTVHQ

SEQ ID NO: 3582 - protein, 43 aa, Artificial Sequence
  Synthetic
STEELKERAKKALKNGNKEKAREALERAGYSTDQAEEIIQRIG

SEQ ID NO: 3583 - protein, 40 aa, Artificial Sequence
  Synthetic
TYRYRVTDKRRADEIAEKAKRKGYTVDVQEVNGQWEVTFD

SEQ ID NO: 3584 - protein, 43 aa, Artificial Sequence
  Synthetic
SKRELEERARKALEKGDKDTAREALKKAGYSPSQAEKIVRQLE

SEQ ID NO: 3585 - protein, 43 aa, Artificial Sequence
  Synthetic
PKDEVTKRVRELLKNGNEDDAEKLAKKANDSRALEEVERWRKS

SEQ ID NO: 3586 - protein, 43 aa, Artificial Sequence
  Synthetic
TQEDLKRLAEELYRRGNEDEAAKAAQKVGLSPEQARRLLKKIF

SEQ ID NO: 3587 - protein, 43 aa, Artificial Sequence
  Synthetic
SPDEQKLREALKKANGDNEEARKILEKLGIDPERARELVERAD

SEQ ID NO: 3588 - protein, 43 aa, Artificial Sequence
  Synthetic
SQVTFNGTTVTFPSTQAAREYAKKFAKKAGLTVEIHGNQVQVH

SEQ ID NO: 3589 - protein, 43 aa, Artificial Sequence
  Synthetic
TTVQFNGVTYQADSPDAAYKWAQEVADKLNLKVHVKNGKVTIE

SEQ ID NO: 3590 - protein, 43 aa, Artificial Sequence
  Synthetic
DTEELLKKVKKVVKNNQPITINGVTVTSDEELKELEKFLRKYV

SEQ ID NO: 3591 - protein, 40 aa, Artificial Sequence
  Synthetic
TTKITVTDEEEAKKVAEKAERNGLQYHIRESNGTYTIEVR

SEQ ID NO: 3592 - protein, 43 aa, Artificial Sequence
  Synthetic
ATVHVDGLTYHFDNPEKALKMALEMAKKKNGTVEYKDDTFHVT

SEQ ID NO: 3593 - protein, 40 aa, Artificial Sequence
  Synthetic
TYRFRVTDRRKAEEVKKWAKKQNLTWREEERDGHVEIEVR

SEQ ID NO: 3594 - protein, 43 aa, Artificial Sequence
  Synthetic
ATVHVNGVEYHFNNPEQADKFAKKVAKTYNLQIEYHGETIKIE

SEQ ID NO: 3595 - protein, 43 aa, Artificial Sequence
  Synthetic
QTVEVNGKKFTFPNPEAAKKFAKKAAKKFNLTVEVHGNTLKVE

SEQ ID NO: 3596 - protein, 43 aa, Artificial Sequence
  Synthetic
PEEAIKDLERLYKEGVSPEQLKEIARRKGIDDRVVEEVERRVS

SEQ ID NO: 3597 - protein, 43 aa, Artificial Sequence
  Synthetic
KTVDVNGIKYTDDDETKVYRYVEELVRKLNLEIRIKDGRVEVH

SEQ ID NO: 3598 - protein, 43 aa, Artificial Sequence
  Synthetic
GTVLVNGQKYTFPNPEEAKEAAERLAKKFNATVHDNGNTFTLK

SEQ ID NO: 3599 - protein, 40 aa, Artificial Sequence
  Synthetic
SETYEFEGEEQAWRFWEEMVRRNLPAEVHIHNGKAVVHVK

SEQ ID NO: 3600 - protein, 43 aa, Artificial Sequence
  Synthetic
IQVRVDGIDYKFDNPEKAKKFAEEVAQKQNRTYHLKDGTFHVT

SEQ ID NO: 3601 - protein, 40 aa, Artificial Sequence
  Synthetic
TETYTFTDSREAERAKREFEKRGLTVTVRTHGTEFRLEVD

SEQ ID NO: 3602 - protein, 43 aa, Artificial Sequence
  Synthetic
DNEEIKEEVKEVVKRGDEDRARKLLERAGVDPKEVEEIIKKVI

SEQ ID NO: 3603 - protein, 40 aa, Artificial Sequence
  Synthetic
TTTITLTDETEARKAAQWAKDQGLKFEIRTHGTEFRVRIE

SEQ ID NO: 3604 - protein, 40 aa, Artificial Sequence
  Synthetic
EINIEMPGEEAALAILKMAQKRNLDARVEVHNGRWIATIR

SEQ ID NO: 3605 - protein, 41 aa, Artificial Sequence
  Synthetic
TEVQSGTETYTFTSETEAEQFARDIGAKRIEKDGTRWRVVT

SEQ ID NO: 3606 - protein, 43 aa, Artificial Sequence
  Synthetic
ATVHVGNVTYHFDNPEKAKEFAERVAKTYQLQVHYHGNTIKIE

SEQ ID NO: 3607 - protein, 43 aa, Artificial Sequence
  Synthetic
QTVKVNHTTYTFTNPEAAKQAAKELAKAYNLTVRIHGNTVTVQ

SEQ ID NO: 3608 - protein, 43 aa, Artificial Sequence
  Synthetic
SQKARELAREAQENNLSEEQIRRYLKKAGVDPEDIKEAERWLK

SEQ ID NO: 3609 - protein, 43 aa, Artificial Sequence
  Synthetic
SKEELKKRIKEALSRGDDKTAEELKKKLPDADEAEREWREEQS

SEQ ID NO: 3610 - protein, 43 aa, Artificial Sequence
  Synthetic
DDEVRKDVERLIREGVDPREVKEILERKGVDPREVERIIREVI

SEQ ID NO: 3611 - protein, 41 aa, Artificial Sequence
  Synthetic
KTLTYNGQTYTFRTTEEAERFARKIGAQRITTDGDTLTLTH

SEQ ID NO: 3612 - protein, 43 aa, Artificial Sequence
  Synthetic
PEDIERELRERLKRGEDQDAEKIARKLGISQEEALRILLEQIV

SEQ ID NO: 3613 - protein, 43 aa, Artificial Sequence
  Synthetic
MTIHVGNYTYHFDNPEEVEEVAKKLAKKYQMDVRFKGNTVEIE

SEQ ID NO: 3614 - protein, 43 aa, Artificial Sequence
  Synthetic
SDEERARRIEEAAKKGQKVRINGQEFTDPEQLRRIAEDIKRKA

SEQ ID NO: 3615 - protein, 43 aa, Artificial Sequence
  Synthetic
ITIHMNGLQFDFSNPEEAKRVAVELAKTYGLQYELKGNRIEIE

SEQ ID NO: 3616 - protein, 41 aa, Artificial Sequence
  Synthetic
KTVTVNGKKYTFDTATEAERFAREQGAKSVTVDGDTITVQT

SEQ ID NO: 3617 - protein, 40 aa, Artificial Sequence
  Synthetic
TQTFKADNKEEANKYSELAKKLGLSWKVTQVNGTWKVTIT

SEQ ID NO: 3618 - protein, 43 aa, Artificial Sequence
  Synthetic
GTVQVNGKNITVPNPEKAKKIAKKLAKKLNLQIEIHGNKITVR

SEQ ID NO: 3619 - protein, 43 aa, Artificial Sequence
  Synthetic
STVTINGQTFTFDTPDAAKEYAEKAAKKLGLTLKTFGNHYKVE

SEQ ID NO: 3620 - protein, 43 aa, Artificial Sequence
  Synthetic
EDWEELAERIRKKHPGSELWKRIQEAQNRGNTQEARDLAKKWG

SEQ ID NO: 3621 - protein, 40 aa, Artificial Sequence
  Synthetic
KITYDTSGEEDAKRVLKELKKNNLEAEIHVHNGRWVIHVK

SEQ ID NO: 3622 - protein, 43 aa, Artificial Sequence
  Synthetic
KTVHYGNVTYHFSNPEEAKEFAKKLAEKAGRKVEYHGDTLKIK

SEQ ID NO: 3623 - protein, 43 aa, Artificial Sequence
  Synthetic
TEDDLKKKAEKALKNGNPEKARRLLEKAGVSKEEQEKFVKSSG

SEQ ID NO: 3624 - protein, 43 aa, Artificial Sequence [sequence omitted]

SEQ ID NO: 3625 - protein, 40 aa, Artificial Sequence
  Synthetic
EIELTVDGEEAALKVKKEAEAKNLEAHVRVENNKYIIHIR

SEQ ID NO: 3626 - protein, 40 aa, Artificial Sequence
  Synthetic
TETRSRKDPTWAEKLRKELERRGITVRVETRGTEVTVTFT

SEQ ID NO: 3627 - protein, 43 aa, Artificial Sequence
  Synthetic
ITVHVNGVEYHFSSPEQAKKFAEEMAKTYNLRVEIHNGTFHIE

SEQ ID NO: 3628 - protein, 40 aa, Artificial Sequence
  Synthetic
SLRYEVHGEEQAKKWIEIAKKQNLRVRVEKHGNKFIVQID

SEQ ID NO: 3629 - protein, 40 aa, Artificial Sequence
  Synthetic
SYEFHVEGEEAMKKVVRHAKEANLKVEVHVHGDRFVIHAE

SEQ ID NO: 3630 - protein, 43 aa, Artificial Sequence
  Synthetic
TTVKVGNTTYTAPTKEEAQKIAEEIAKQLNLKVEEHNGTFHIE

SEQ ID NO: 3631 - protein, 43 aa, Artificial Sequence
  Synthetic
SWRDILRLAEEAIKKGKPLQLGDYKITTEEEARRVADEARKRA

SEQ ID NO: 3632 - protein, 43 aa, Artificial Sequence
  Synthetic
MTVHVNGLTYHFDNPEQAEKFAKEMAKKAGLQMKIKDGTIKME

SEQ ID NO: 3633 - protein, 40 aa, Artificial Sequence
  Synthetic
TQSTTVTDPEKARQVEEELRRRGKKVQVHDDNGKFEVREE

SEQ ID NO: 3634 - protein, 43 aa, Artificial Sequence
  Synthetic
SEKEKKAQELIKKANGDWKTLKKQLEKEGNDELAELVERLAKG

SEQ ID NO: 3635 - protein, 40 aa, Artificial Sequence
  Synthetic
EYRVETDGKEQADEAMKKMHKHNLEVHVEKHGDKWVVRAE

SEQ ID NO: 3636 - protein, 43 aa, Artificial Sequence
  Synthetic
RTIEVNGQKYTVPDPKQAEELAKKLAKKYNLTVHVKNGTIHVH

SEQ ID NO: 3637 - protein, 43 aa, Artificial Sequence
  Synthetic
ATVKWNGVQVDFDNPEEAKKYAKEVAKKLNGEVHMKDGTLEIH

SEQ ID NO: 3638 - protein, 43 aa, Artificial Sequence
  Synthetic
QKDEAEKKAREAQKRGNEDKARDLLRKAGYSDEQIEKISRKLG

SEQ ID NO: 3639 - protein, 43 aa, Artificial Sequence
  Synthetic
ITVKVGNLEYHFNNPEEAKKMAEKLAQEFQGTWELHNGTIHVE

SEQ ID NO: 3640 - protein, 40 aa, Artificial Sequence
  Synthetic
GITITVEGEELARKIYKEMADRNLNVEVRQDGDQWVITFE

SEQ ID NO: 3641 - protein, 43 aa, Artificial Sequence
  Synthetic
MTVHVNGVTYHFDNPEEAKKFVEEVAKKLNLTYELKDGTIHVE

SEQ ID NO: 3642 - protein, 43 aa, Artificial Sequence
  Synthetic
DVESLVKQVEEVLKKKSTITLNGQTFTTEEEITTVLEELRRKL

SEQ ID NO: 3643 - protein, 43 aa, Artificial Sequence
  Synthetic
GEVHIGNTTYHFDTDEEVEKFVKTVVKKLGLKIEQHGKTWHVS

SEQ ID NO: 3644 - protein, 43 aa, Artificial Sequence
  Synthetic
QTVHIGNTTYTFDNPEEAYKAAKELAKKNNLQVTVKGTTVEVH

SEQ ID NO: 3645 - protein, 43 aa, Artificial Sequence
  Synthetic
DEEVKKQVEKLKKNNVESVTINGFNIEITTDEQLKKLVKILES

SEQ ID NO: 3646 - protein, 43 aa, Artificial Sequence
  Synthetic
DWEEVERAAREAIKKNQSITVNGINFTDPEELKKAIELAKKLA

SEQ ID NO: 3647 - protein, 43 aa, Artificial Sequence
  Synthetic
ATVHLNGLTYHFSNPEEADKFAKEMAKKLNRQVTVHGETWQVH

SEQ ID NO: 3648 - protein, 43 aa, Artificial Sequence
  Synthetic
PKEEAQRRAEEWIRRGNDEEAKRALKSAGYSEDEAQEVVERIK

SEQ ID NO: 3649 - protein, 43 aa, Artificial Sequence
  Synthetic
LTVHVNGVQYDFSSPEEADKFAKELAKKNNLEIHYHGNTIRVE

SEQ ID NO: 3650 - protein, 43 aa, Artificial Sequence
  Synthetic
TTVKYNGLTYHFDTPEKAQKFAEKAAKKANLTVTQKNGTWQVH

SEQ ID NO: 3651 - protein, 40 aa, Artificial Sequence
  Synthetic
TKTYTITNEEDARRYAEKLKKKGLTVRYEKDNGTFRVEIG

SEQ ID NO: 3652 - protein, 43 aa, Artificial Sequence
  Synthetic
DEKEKQVKKIARQVNVSDDEVRKVLDEANGDEEKVKEVLKRLL

SEQ ID NO: 3653 - protein, 40 aa, Artificial Sequence
  Synthetic
SETFTTNGEEQMKRVVKMLKKRNLRVEVHVKNNRFVIHAK

SEQ ID NO: 3654 - protein, 43 aa, Artificial Sequence
  Synthetic
TEEAKKIAQHYYRSGVKTITINGVQIDLDNEEKAAKLVEKALS

SEQ ID NO: 3655 - protein, 40 aa, Artificial Sequence
  Synthetic
TEHITVTDEKEAKEVAKKWKKLGYDVQIHKDGDTLTLQVN

SEQ ID NO: 3656 - protein, 43 aa, Artificial Sequence
  Synthetic
PEDLKKKAEKLAKNGLTPDEIKKIAEKEGNERLKEYAEKLKKY

SEQ ID NO: 3657 - protein, 43 aa, Artificial Sequence
  Synthetic
SEEDKKKLIEKLKRNGNEELRRIAEELGVSAEEAERYKRKQEG

SEQ ID NO: 3658 - protein, 40 aa, Artificial Sequence
  Synthetic
TTTKEFTDEEEARRAATEAKKRGIEVRITKENGTWKVNFG

SEQ ID NO: 3659 - protein, 43 aa, Artificial Sequence
  Synthetic
KTVKVDGYDFTFDNPEQAKKFAKEMAKKKNLTVEYHGDTIRVE

SEQ ID NO: 3660 - protein, 40 aa, Artificial Sequence
  Synthetic
NIEITTHGPEDVKKAIEEAKKKNLSYEVRVENGQYIVHLK

SEQ ID NO: 3661 - protein, 43 aa, Artificial Sequence
  Synthetic
AHVHVNGVTYEFPNPEEAKKFADKLAKEVGGEVQLHNGHIHIE

SEQ ID NO: 3662 - protein, 41 aa, Artificial Sequence
  Synthetic
PTVHDGDTTYTASSDEEAERIARKAGASEINVTNGQVEVRP

SEQ ID NO: 3663 - protein, 43 aa, Artificial Sequence
  Synthetic
GTVNVGDTTYKYPNPEKAIEAAKKLAKKYNLTVKVKGNEITVK

SEQ ID NO: 3664 - protein, 40 aa, Artificial Sequence
  Synthetic
TEDIRVTDDREAERVREELERRGKRVERRKSNGSITIHST

SEQ ID NO: 3665 - protein, 43 aa, Artificial Sequence
  Synthetic
QQVKVGNTTYTVDNPEKAQKLAEKLAKKAGLKVTVKGNTWHVQ

SEQ ID NO: 3666 - protein, 43 aa, Artificial Sequence
  Synthetic
SQVHLGNETYHFENPEEVKKFVEEVKKKYGLQVHEKDGTFHFS

SEQ ID NO: 3667 - protein, 43 aa, Artificial Sequence
  Synthetic
SDEEKARRALEAAKRGQPLKLGDIEFTTPEQARKWAERVLKEL

SEQ ID NO: 3668 - protein, 43 aa, Artificial Sequence
  Synthetic
SSDEKKKLLELAKKKKKIRVGNTEVELGSEEAKRLEEEVRREE

SEQ ID NO: 3669 - protein, 43 aa, Artificial Sequence
  Synthetic
TTVEFNGQKVTFPSPDAAKKFAEQVAKEAGKKVTVKNGNYKVE

SEQ ID NO: 3670 - protein, 43 aa, Artificial Sequence
  Synthetic
PEEIEKILEKVLRNNTKQITINGVTVHITSEEDVKEVVKQVEY

SEQ ID NO: 3671 - protein, 43 aa, Artificial Sequence
  Synthetic
NEIEKKVKKLVKEGQPVEVHYNGQTFHVTSEEEAEELVRKVVY

SEQ ID NO: 3672 - protein, 43 aa, Artificial Sequence
  Synthetic
SEEEARRKARKIAKNNQPIEVDGQRYTNPDEIEEAYREWLEKY

SEQ ID NO: 3673 - protein, 40 aa, Artificial Sequence
  Synthetic
SETRTVNGEEQARKLMEEAKKRNLEVHLRIENGKFIVTLH

SEQ ID NO: 3674 - protein, 40 aa, Artificial Sequence
  Synthetic
TETYTFDSKELARTFAEEAKRRGLTVELRKDNGQWKVTIK

SEQ ID NO: 3675 - protein, 43 aa, Artificial Sequence
  Synthetic
SEAKILAAYLALKRNRPVTVNGFTVTAGSDTAKKLLKKYKKLL

SEQ ID NO: 3676 - protein, 40 aa, Artificial Sequence
  Synthetic
TTTITVTNETKARQIEEKLRRKGLTVTNRKHNGEFRLEVK

SEQ ID NO: 3677 - protein, 43 aa, Artificial Sequence
  Synthetic
TTVHLNGVTYHFNNPEEVKKFVEKMAKTYNLQVHVEGDQIEMK

SEQ ID NO: 3678 - protein, 40 aa, Artificial Sequence [sequence omitted]

SEQ ID NO: 3679 - protein, 43 aa, Artificial Sequence
  Synthetic
YHVHVGNLTWTFDEPEQARKMAEKLAKEKGLQVELHNGHFHME

SEQ ID NO: 3680 - protein, 40 aa, Artificial Sequence
  Synthetic
RVTFHMHGEEQVKWAIEWARRANLSYEVQHHGDQVVIHAE

SEQ ID NO: 3681 - protein, 43 aa, Artificial Sequence
  Synthetic
DWEKVEKKVRDVLHKGEPVTVGNTTYTSEEEIRRLLEHVRKQI

SEQ ID NO: 3682 - protein, 43 aa, Artificial Sequence
  Synthetic
DERVKSIVEEVQRKNLKQVTINGYTINVDDDKQLEEIVKKLLS

SEQ ID NO: 3683 - protein, 40 aa, Artificial Sequence
  Synthetic
GVTIRVRGTELMQRLVEEAKRANLSYHIEVHGDEYIITIE

SEQ ID NO: 3684 - protein, 40 aa, Artificial Sequence
  Synthetic
DIRIETHGEEQARKVIKEAKKRNLRAEVHIENNKFVVHIR

SEQ ID NO: 3685 - protein, 40 aa, Artificial Sequence
  Synthetic
RETYTTHGEEDAKRVAEKMKKRNLRVEIHVHNGRFILHAE

SEQ ID NO: 3686 - protein, 43 aa, Artificial Sequence
  Synthetic
DERVEETVDRLIKDGYSDEQIKDILRKQGVDEREVQKVIKKVK

SEQ ID NO: 3687 - protein, 43 aa, Artificial Sequence
  Synthetic
DERVEKIVKEVKSKGIERVTVNGVDIDLKNDEEVKKLLKKVLS

SEQ ID NO: 3688 - protein, 43 aa, Artificial Sequence
  Synthetic
ATVHINGVTYHFDEPKQAYKFAEEMARKHNGQMHFEGDQVEVK

SEQ ID NO: 3689 - protein, 40 aa, Artificial Sequence
  Synthetic
SYQWHVHGEEQAMRVMKMARKMNLEVHVEKHGDHIIIRAD

SEQ ID NO: 3690 - protein, 43 aa, Artificial Sequence
  Synthetic
MELVKKVTKKVRNGQPVTLRIGDQEYTITTDEQVEEVVRKYLS

SEQ ID NO: 3691 - protein, 43 aa, Artificial Sequence
  Synthetic
TTVKVNGQEYTFPSIEAAQKWAEEYAQKQGLEVHLKNGTVTVK

SEQ ID NO: 3692 - protein, 43 aa, Artificial Sequence
  Synthetic
KQVLLNGQTITIDTPEKAQKIAEEFAKKKNLTVTLKNGTFQVH

SEQ ID NO: 3693 - protein, 43 aa, Artificial Sequence
  Synthetic
PPEEAKEFAKEVKRRNTTVTIGNYTVTTPEEAREIYRWLLEQL

SEQ ID NO: 3694 - protein, 43 aa, Artificial Sequence
  Synthetic
SPEEFKEALRAAKENRPVTLGGETFPAGSPRFKEIVERAKKAL

SEQ ID NO: 3695 - protein, 43 aa, Artificial Sequence
  Synthetic
GEVHVGDQTYTFDNPEKAQKFAEEVAKKLGLTVKVKNGKFKVT

SEQ ID NO: 3696 - protein, 43 aa, Artificial Sequence
  Synthetic
KTVHVNGKTYTFPSPEKAQKFAEKIAKKLGLTVTVKNGQVHVE

SEQ ID NO: 3697 - protein, 40 aa, Artificial Sequence
  Synthetic
TTEITTTDPEEARRLAEEAKKKGLTVTIEERNGTYTVKVE

SEQ ID NO: 3698 - protein, 43 aa, Artificial Sequence
  Synthetic
STVHVNGTEYTAPSAEAAEKFAQKLADKYNLTVHVHGNTVKVE

SEQ ID NO: 3699 - protein, 40 aa, Artificial Sequence
  Synthetic
TKTYTFTDRREAEKFREEARKKGGDVQIETNGTEYRVKLG

SEQ ID NO: 3700 - protein, 43 aa, Artificial Sequence
  Synthetic
LTVHVGNVTYHFDEPEQAKKFVEEIAKKQQLKVELHNGHFHVE

SEQ ID NO: 3701 - protein, 43 aa, Artificial Sequence
  Synthetic
MTIHLGNLTWHFDNPEQAKEMAKKLAETYNGQMHIKDGTIHIE

SEQ ID NO: 3702 - protein, 43 aa, Artificial Sequence
  Synthetic
KKVTLNGQTFTFPSAKAAQEWAKKWAKKKGLTVKVKGNQVRVE

SEQ ID NO: 3703 - protein, 43 aa, Artificial Sequence
  Synthetic
TKVTVNGETYHFPSLEAAQEYAKKLAKELNLTVHTKNGKVTLK

SEQ ID NO: 3704 - protein, 43 aa, Artificial Sequence
  Synthetic
TTIHVGNTTFHFDNPEEAKKFVEKIAKDLGLSVETHGNTWHVE

SEQ ID NO: 3705 - protein, 43 aa, Artificial Sequence
  Synthetic
QQLHVNGMTYHFSNPEEAKKMALKLAKENNLRVEFHGDQIHVE

SEQ ID NO: 3706 - protein, 43 aa, Artificial Sequence
  Synthetic
NEDELRKRAEELARRTERVRIAGYEWRTEEQIKRAAEILAKLL

SEQ ID NO: 3707 - protein, 41 aa, Artificial Sequence
  Synthetic
TTLTVNGKTYTFSTTDEAEEWARRRGATRIEVDGTTVTVDE

SEQ ID NO: 3708 - protein, 43 aa, Artificial Sequence
  Synthetic
SEDSARELFRKAYESGNEDLARKLARKAGADDDLIEKIRKEVE

SEQ ID NO: 3709 - protein, 43 aa, Artificial Sequence
  Synthetic
PQDELKERAKKAIKNGNKDKAREILERAGYSQDWAEEVIKKIG

SEQ ID NO: 3710 - protein, 40 aa, Artificial Sequence
  Synthetic
TEEYHVPSETAARQLAEKARKKGLEFRVTRDGTTFRVEIR

SEQ ID NO: 3711 - protein, 43 aa, Artificial Sequence
  Synthetic
GKVEVGNTTYTAPSLEAAEKIAQKLAEKYNATYQTHGDTVKVE

SEQ ID NO: 3712 - protein, 40 aa, Artificial Sequence
  Synthetic
TTEFEVTDETAARKAADWAKKLGLTFTVTRDGTTWRVKVN

SEQ ID NO: 3713 - protein, 43 aa, Artificial Sequence
  Synthetic
DPKAEKIAEELKKRNVTQITVGGTTVTINSEEEAKKAAKIEAQ

SEQ ID NO: 3714 - protein, 43 aa, Artificial Sequence
  Synthetic
TTVKVGNKTFQYPNPEEAKKAAEYWAKLNNLEVQKHNGTFHVQ

SEQ ID NO: 3715 - protein, 43 aa, Artificial Sequence
  Synthetic
DLEELVKKVEEVVKKNQSVTINGKQLDDPTEIKKVLEQLRRKS

SEQ ID NO: 3716 - protein, 40 aa, Artificial Sequence
  Synthetic
SITFHLHDEEQVKKLVDIARKVNLEIEYEVHNGQFIVTIK

SEQ ID NO: 3717 - protein, 43 aa, Artificial Sequence
  Synthetic
QQITFNGETYTIPNPEKAKELAKKIAKKLNLTVEVHGNTVKVT

SEQ ID NO: 3718 - protein, 43 aa, Artificial Sequence
  Synthetic
STVHVGDYTYTFDNPEEAKEAAKQLAKKYNLPFTIHGNTIQVQ

SEQ ID NO: 3719 - protein, 43 aa, Artificial Sequence
  Synthetic
QEVDVNGQKYHFNDPKQVKEFVETVAKRLGLQVHEKDGTFELH

SEQ ID NO: 3720 - protein, 43 aa, Artificial Sequence
  Synthetic
PDELKKLVKKLAKLGKPINVNGITFNPNNPEAVQAALEAAKKV

SEQ ID NO: 3721 - protein, 43 aa, Artificial Sequence
  Synthetic
SEDEKREKAKKLKKKGNEDEARRLLKEAQNEEAKKLLKKIEDE

SEQ ID NO: 3722 - protein, 43 aa, Artificial Sequence
  Synthetic
TTVHDGNKTFKFDTLDKAIKWAQKVAKKNNGTVEVHGNTIHLE

SEQ ID NO: 3723 - protein, 43 aa, Artificial Sequence
  Synthetic
GEITVNGKTIQSPNTEKLRKIAKKLAKKYNATVHIKGNHVTVK

SEQ ID NO: 3724 - protein, 43 aa, Artificial Sequence
  Synthetic
DEVDKIVESIRRVGGPLTFTYNGYTVTVRDEEEVKKFVKSIQS

SEQ ID NO: 3725 - protein, 40 aa, Artificial Sequence
  Synthetic
DEKIEIEGEEKARRAAEKMKRHNLEVEIHIHGDKVILRVR

SEQ ID NO: 3726 - protein, 43 aa, Artificial Sequence
  Synthetic
GTVHVNGYTYHFSEPEQAKEFAEKMARKLNLEVRVKGNTVEVE

SEQ ID NO: 3727 - protein, 43 aa, Artificial Sequence
  Synthetic
GELTVNGKTLHVDTWKQAVQLAKELAKKLNLEVQVHGTKVTVK

SEQ ID NO: 3728 - protein, 43 aa, Artificial Sequence
  Synthetic
TTVTVNGQKFQASTTDEAQKYAKKAAKIYNAKIEIHGDKITVK

SEQ ID NO: 3729 - protein, 43 aa, Artificial Sequence [sequence omitted]

SEQ ID NO: 3730 - protein, 43 aa, Artificial Sequence
  Synthetic
PERDLEEKFRKIVEQGNEDEAKQWAKDQGLSPDTAEELARRVK

SEQ ID NO: 3731 - protein, 43 aa, Artificial Sequence
  Synthetic
SEKAKKIAEELAKRGVSPEEIEKILEKLGASEQDKKDARKFLS

SEQ ID NO: 3732 - protein, 43 aa, Artificial Sequence
  Synthetic
TTFTVNGTTYHADTQEEAEKKARKAAEKLGATVTKVNGVFQVH

SEQ ID NO: 3733 - protein, 40 aa, Artificial Sequence
  Synthetic
REKLTFHTEDQARKAAKKAKNKGLSVEVTQQNGTWTVHIE

SEQ ID NO: 3734 - protein, 40 aa, Artificial Sequence
  Synthetic
DYTVHVKGEEKVRKVIEHMRRMNLEVHVETHNGEYIIHAS

SEQ ID NO: 3735 - protein, 40 aa, Artificial Sequence
  Synthetic
ETHVKFDDKKQAQEYYEKAKKNNLDVTLTQHGNTFQVTVK

SEQ ID NO: 3736 - protein, 43 aa, Artificial Sequence
  Synthetic
TTVLVNNKEYKFNNPELAQKAAEEIAKKLGLTVTLHGNTFKIT

SEQ ID NO: 3737 - protein, 40 aa, Artificial Sequence
  Synthetic
EQTWHVEGEEQAKDIVDKLKKQNLQVEVEVRNGRIIITAK

SEQ ID NO: 3738 - protein, 43 aa, Artificial Sequence
  Synthetic
TDEEKKKEIIERAARGDKSAEDKLRKLAGGDEEEVQRLKKKAG

SEQ ID NO: 3739 - protein, 40 aa, Artificial Sequence
  Synthetic
AITIELEGEEQAKEVKKEAEKRNLEAEIQVHNGKWRVTLR

SEQ ID NO: 3740 - protein, 43 aa, Artificial Sequence
  Synthetic
QTVHVQGEQYNIDSEEKAKKVAKELAKKFGLTVHVTNGHITIK

SEQ ID NO: 3741 - protein, 43 aa, Artificial Sequence
  Synthetic
GQVHVNGTTYHFPTTQAAIEFAKEVAKKLNLPVTVRGDQIKVE

SEQ ID NO: 3742 - protein, 40 aa, Artificial Sequence
  Synthetic
EETIEVHGEEQIRKAIKIAKAANLKVEVRVENGKYVVHLK

SEQ ID NO: 3743 - protein, 43 aa, Artificial Sequence
  Synthetic
TIVLINGQKYTASSPDEAKKIAEKLAKKYNATVTKKNGTFKVT

SEQ ID NO: 3744 - protein, 43 aa, Artificial Sequence
  Synthetic
TTVHVNGQTYHFSDPNKVKHFVERVVKELGLKLETHNGTFHVS

SEQ ID NO: 3745 - protein, 40 aa, Artificial Sequence
  Synthetic
DITYTFDGEEKAIKFAKEMKKRNLQVHIRIENGKAVVDVR

SEQ ID NO: 3746 - protein, 43 aa, Artificial Sequence
  Synthetic
ITVHVGNVTYHFSSPEEVKKFLEEVAKKQNREVEVRGNEVHVE

SEQ ID NO: 3747 - protein, 40 aa, Artificial Sequence
  Synthetic
QVHITVEGDEQMKKAIEDLRRKNLEVHYEQHGDKYIITAD

SEQ ID NO: 3748 - protein, 43 aa, Artificial Sequence
  Synthetic
TPLLEEARRIAEERHLSPDQFKELAERLGVDPEEAEQYARTYL

SEQ ID NO: 3749 - protein, 43 aa, Artificial Sequence
  Synthetic
DDEEKKKRAKKKKGPVTVEVNGWTVTSGSELEARERARRLAEG

SEQ ID NO: 3750 - protein, 40 aa, Artificial Sequence
  Synthetic
QTTYEFEGKEAADDFMKKAKEANLKVEVERHGDRFIITLE

SEQ ID NO: 3751 - protein, 43 aa, Artificial Sequence
  Synthetic
TPEENIKKAQEAIKKNKPVTIDGQQINSQEEAKRVIEELKRRL

SEQ ID NO: 3752 - protein, 40 aa, Artificial Sequence
  Synthetic
KQQVQVTDSEQAQKVAEEWKKKGYDVTIHTKNGQFTVKFG

SEQ ID NO: 3753 - protein, 43 aa, Artificial Sequence
  Synthetic
SDKEKLAKKVLKNAGNNPEKAREILQREGNEEAEEILKKIVKN

SEQ ID NO: 3754 - protein, 43 aa, Artificial Sequence
  Synthetic
LTVHVNGVQYHFNNPEQVKKFIKKMAKTQNRTVQVHGETWRIE

SEQ ID NO: 3755 - protein, 43 aa, Artificial Sequence
  Synthetic
DEEQKKIREQLRKENKDYQAFEKALKNGVSTEEAKKIAEKATS

SEQ ID NO: 3756 - protein, 43 aa, Artificial Sequence
  Synthetic
KQVHVNGVTYHFENPEEAKKFADKVARSLGLTYEMHNGQFHVE

SEQ ID NO: 3757 - protein, 43 aa, Artificial Sequence
  Synthetic
ATVHVNGVQYDFTSPEQMEKFAKEVAKKLGGRVEIHGNKLTVK

SEQ ID NO: 3758 - protein, 43 aa, Artificial Sequence
  Synthetic
GTVHVNNETYHFPNPELAKKFAEKVAKELGLTVTERGNTWKVT

SEQ ID NO: 3759 - protein, 43 aa, Artificial Sequence
  Synthetic
LHVHVGNTTYQFTSPEQMKKFAKEMASKLGMQVHEHGNEVHVE

SEQ ID NO: 3760 - protein, 43 aa, Artificial Sequence
  Synthetic
HTVKYNGKEYDASSQDEAEEYAKKVAKKLNLTVEIHGPTVTIK

SEQ ID NO: 3761 - protein, 40 aa, Artificial Sequence
  Synthetic
SLTIQTHGEEQVKKILKMAKDRNLEVHVRQEGDRYILQLD

SEQ ID NO: 3762 - protein, 40 aa, Artificial Sequence
  Synthetic
SFQYTVDGPEAAKKIYKMLAKANLNVQAHVHGDKVIIEAD

SEQ ID NO: 3763 - protein, 40 aa, Artificial Sequence
  Synthetic
TTEIEVTDEENARRAEKELRKRGLTVTWTEDNGRFELRVD

SEQ ID NO: 3764 - protein, 40 aa, Artificial Sequence
  Synthetic
EIQYTLEGEEAAKKAKKELEKQNLKVEVHVDNGQFILRAK

SEQ ID NO: 3765 - protein, 43 aa, Artificial Sequence
  Synthetic
TQVTVNGETYQAPSQEAAKKLAKKLAKKFNVTVHVHGNQIELK

SEQ ID NO: 3766 - protein, 41 aa, Artificial Sequence
  Synthetic
TTLIFNGEKYTVSSPEEAEKLAKKLGAKEVTIHGNTVKVKQ

SEQ ID NO: 3767 - protein, 43 aa, Artificial Sequence
  Synthetic
LTVTVNGVTYTFDNPEEFQRMVERLAREANLDVHYHGETVTIT

SEQ ID NO: 3768 - protein, 43 aa, Artificial Sequence
  Synthetic
QTVRVDGIQYDFSSLEEVLKFAKEVAKKKGREVQLHNGTWHIE

SEQ ID NO: 3769 - protein, 43 aa, Artificial Sequence
  Synthetic
TEEEARRRAEKALREGNEDKAREILQRAGVSDEEADKIIKELL

SEQ ID NO: 3770 - protein, 43 aa, Artificial Sequence
  Synthetic
GKVTVNGETYKFDSPDLAKKFAEEAAKKYGATVKKDGNTYTVT

SEQ ID NO: 3771 - protein, 43 aa, Artificial Sequence
  Synthetic
DEREKKLERVIRKLNVDERVQREVKRRANGDIDKVVEILQRIY

SEQ ID NO: 3772 - protein, 43 aa, Artificial Sequence
  Synthetic
PSEQAKKEAIRAWQEGNEEERRRLEEEYQIDPKELEELIRRQV

SEQ ID NO: 3773 - protein, 43 aa, Artificial Sequence
  Synthetic
TTVEFNGEKITFPTTQAAEEYAKKVAKKQNLTVHVDGNTITVT

SEQ ID NO: 3774 - protein, 43 aa, Artificial Sequence
  Synthetic
KTVTVNGTTYTFDTQDAAKKFAKKVAKKQNLTVHIDGNTIKIK

SEQ ID NO: 3775 - protein, 43 aa, Artificial Sequence
  Synthetic
QTIHIGNTTYHIDDEKQVEEFVKKLVKELGLKVETHGDTFHVQ

SEQ ID NO: 3776 - protein, 43 aa, Artificial Sequence
  Synthetic
DREEILRRAKEALERGRPVNVGPVEVRDPEQLKELARELEEKL

SEQ ID NO: 3777 - protein, 43 aa, Artificial Sequence
  Synthetic
PPLAEEIKKRVRNGETVRYTKGDETYEVTSEEEAERLAKIINA

SEQ ID NO: 3778 - protein, 43 aa, Artificial Sequence
  Synthetic
SQREEELRREIEEKNLSEEQARRLAQKLGLSSEEEKRARKLAN

SEQ ID NO: 3779 - protein, 40 aa, Artificial Sequence
  Synthetic
EITYESPGEEAAKRIQKELKKRNYEAHIRVENGKWVVHAH

SEQ ID NO: 3780 - protein, 43 aa, Artificial Sequence
  Synthetic
DEDVDKDVKRLRDEGVSPEQVERILRRKGVDPRAIEKAKKILS

SEQ ID NO: 3781 - protein, 40 aa, Artificial Sequence
  Synthetic
TYTFHVENEQKAKKIAKEWQNQGKDVTITKKNGQFTITVK

SEQ ID NO: 3782 - protein, 43 aa, Artificial Sequence
  Synthetic
KTVTVNGVTYHFDTLEEMKKFVDEVVKKAGLQVEYHGETVHIE

SEQ ID NO: 3783 - protein, 43 aa, Artificial Sequence
  Synthetic
GTVHVNGKKYTFSSPEKALKFAEEAANKYNLTFTLQGNTVHVE

SEQ ID NO: 3784 - protein, 43 aa, Artificial Sequence
  Synthetic
EPKEYERRAKKAAKKGDEEKARELLERAGWSPEQAQRIVDKLS

SEQ ID NO: 3785 - protein, 43 aa, Artificial Sequence
  Synthetic
STVQVNGITIQASSLKEAKEIAQKWAEKLNLQLTVQGDTVQVH

SEQ ID NO: 3786 - protein, 43 aa, Artificial Sequence
  Synthetic
KTVHFGNQTVTFPTTEEARKFAKQAAKELNLQVHIDGNTITVT

SEQ ID NO: 3787 - protein, 43 aa, Artificial Sequence
  Synthetic
DPRLEELVERLKKNGVSEEEIKKILQEQGVDDDQVEKIVQKVS

SEQ ID NO: 3788 - protein, 43 aa, Artificial Sequence
  Synthetic
DQEEVEKKVRDAQRKGDKDKVRELLKKLGLDEEEVKKYVERKV

SEQ ID NO: 3789 - protein, 43 aa, Artificial Sequence
  Synthetic
PDKARKIAEELARNGYSREQIEKILQKAGVDPSEAQQVIKEAT

SEQ ID NO: 3790 - protein, 40 aa, Artificial Sequence
  Synthetic
SLTYTMDGEEQMRHWYKWAQKQNLEARVRVENGKWILTAD

SEQ ID NO: 3791 - protein, 43 aa, Artificial Sequence
  Synthetic
TTVHVNGYTYHFDNPEEVEKFAKKLAKTYNLEVRFHGENVRIE

SEQ ID NO: 3792 - protein, 40 aa, Artificial Sequence
  Synthetic
EVHIQTEGEEDAMRLYKEAAKRNLEVHVEVHNGQWVITFK

SEQ ID NO: 3793 - protein, 43 aa, Artificial Sequence
  Synthetic
NTVHFNGVTYHFDNPEEAKKFAEELAKKSGLTFEIHNGEVHFK

SEQ ID NO: 3794 - protein, 43 aa, Artificial Sequence
  Synthetic
AEVNVKGVTYKFSSPEQAVKFAEKMAKKLGGQLEYHGETLKVK

SEQ ID NO: 3795 - protein, 43 aa, Artificial Sequence
  Synthetic
SEVHVGNTTYHFDTLEEAQEAAKKLAKKLNLEVQTHNGKVTLH

SEQ ID NO: 3796 - protein, 43 aa, Artificial Sequence
  Synthetic
STEEKLKRAEKEARKGNPVTINGVTITSPEEAKELEKRVRNNS

SEQ ID NO: 3797 - protein, 43 aa, Artificial Sequence
  Synthetic
TQVTINGKTYTFPSPEKAADFAKKLAKNAGLTVQVHGSEIQVH

SEQ ID NO: 3798 - protein, 43 aa, Artificial Sequence
  Synthetic
TTEEIYRKVKTVLERGDTLHVNGKTFNDPDEIRKILEKVKKEL

SEQ ID NO: 3799 - protein, 43 aa, Artificial Sequence
  Synthetic
DLDKLLETVERLVRNGQPFTVGDVTVTDEEVLKKLEEWVKKKS

SEQ ID NO: 3800 - protein, 43 aa, Artificial Sequence
  Synthetic
DDEQIREEQRRIEEENNEEDASRLAKKANDSSIEEELRRRIKS

SEQ ID NO: 3801 - protein, 43 aa, Artificial Sequence
  Synthetic
TTVHVGNIQIHVDTPEQAKKAAQKLAEKFNLTVHVDGNKVTLK

SEQ ID NO: 3802 - protein, 43 aa, Artificial Sequence
  Synthetic
TPELEKILKKAKKNNLTTVQVNGVQVTASSAEEAVKIAIKILK

SEQ ID NO: 3803 - protein, 43 aa, Artificial Sequence
  Synthetic
KDDLKKKAEKLLKNGITKVTVNGITIDIQNPKKAAELIAKALN

SEQ ID NO: 3804 - protein, 43 aa, Artificial Sequence
  Synthetic
SEKELRAVWKAVQNNRPVTVDGKTYKPGTPEAENLAKQFEKEY

SEQ ID NO: 3805 - protein, 43 aa, Artificial Sequence
  Synthetic
KTVHVNGVQYDFNNPEEAKKFAKELAEKAGLTFEIHGDTIHVE

SEQ ID NO: 3806 - protein, 43 aa, Artificial Sequence
  Synthetic
KEEEAAKVARKAVKSGTTLRYGDIEFTSEDEARQFIEEVERKY

SEQ ID NO: 3807 - protein, 43 aa, Artificial Sequence
  Synthetic
TTVHVNGVQYDFENPEKAEKWARELVKKMGRTIELHNGHFHVK

SEQ ID NO: 3808 - protein, 40 aa, Artificial Sequence
  Synthetic
QLTITTHGEEDAKRVMKELRNQNLEVHVKQENGQFHITAR

SEQ ID NO: 3809 - protein, 40 aa, Artificial Sequence
  Synthetic
QIDIETHGEEDAKRVAKEAKKRNLRAEIHIDGDKIIVHIK

SEQ ID NO: 3810 - protein, 43 aa, Artificial Sequence
  Synthetic
KTVHVNRYTYTFDNPEEFKRFVEEMAKKLGLKVEFHGDTVRVE

SEQ ID NO: 3811 - protein, 43 aa, Artificial Sequence
  Synthetic
PKREWEERAERAVRSGNEDKAREALKNAGYSEEEAERILKKLS

SEQ ID NO: 3812 - protein, 43 aa, Artificial Sequence
  Synthetic
SDKAREILRKLLENGVSPEEAREIAERLGVDPSEAEKLLRELL

SEQ ID NO: 3813 - protein, 40 aa, Artificial Sequence
  Synthetic
AIRIETHGEEQAKRVAKMAKKRNLKVEIHEHNGKFVIHLK

SEQ ID NO: 3814 - protein, 40 aa, Artificial Sequence
  Synthetic
EETIEVTDPELAREIAERIAKKGYTVTVRTDGNRYRVHRK

SEQ ID NO: 3815 - protein, 43 aa, Artificial Sequence
  Synthetic
ATVHVNGYTYHFNNPEEMKEFALKVAKKSNAKVEFHGDTVHIE

SEQ ID NO: 3816 - protein, 43 aa, Artificial Sequence
  Synthetic
GTVHVHGNKYTFDNPDQAKKFAKKAAEIYNATLYVDGNTVKVE

SEQ ID NO: 3817 - protein, 40 aa, Artificial Sequence
  Synthetic
RLETRVDGEEAAMKVMKKMQAQNLHVEVHIENGKYVIRAE

SEQ ID NO: 3818 - protein, 40 aa, Artificial Sequence
  Synthetic
SETYTMPGEEAMRKFVEMAKKRNLEVEVEVHNGEWVVTLH

SEQ ID NO: 3819 - protein, 43 aa, Artificial Sequence
  Synthetic
GKVVNGNTYYKAPTTDEAKKIAQKLAKKYNLTVHVDGNTVKLE

SEQ ID NO: 3820 - protein, 43 aa, Artificial Sequence
  Synthetic
DKQEEIDRLAKKAGVTTTEELEKWLEKQGNEDLAEKVRQLRDG

SEQ ID NO: 3821 - protein, 43 aa, Artificial Sequence
  Synthetic
SQEEAKKKAEEAARRGNEEKARQILKKAGVSPDEIEQILRDLG

SEQ ID NO: 3822 - protein, 40 aa, Artificial Sequence
  Synthetic
TTEFTVTDRREVERWRKEAETKGLTFTTTEENGTWRVRID

SEQ ID NO: 3823 - protein, 43 aa, Artificial Sequence
  Synthetic
DELKELAEEAIKRANGDEEKVKEILKRLGVDPRQVERAVRLVS

SEQ ID NO: 3824 - protein, 43 aa, Artificial Sequence
  Synthetic
SEEAKRLLEELLQNGLSEDQAIEEAQKAGLTPDEIKKALKELL

SEQ ID NO: 3825 - protein, 43 aa, Artificial Sequence
  Synthetic
ITVHVNGLTYHFDEPEQVKEFLEKLAKTYNLEIKWHGNTVKME

SEQ ID NO: 3826 - protein, 43 aa, Artificial Sequence
  Synthetic
PPKAKKIAKKLKKNNITTVQVNGVQYTANSEDAWQEAAKAIAN

SEQ ID NO: 3827 - protein, 43 aa, Artificial Sequence
  Synthetic
SSEAERKFRELLKKGISPEEAAKQLRKDGYSDDEAEEARKRAE

SEQ ID NO: 3828 - protein, 40 aa, Artificial Sequence
  Synthetic
TTRQRVTTEDKARKLAEEWKRRGYEVRVEKSGGQWEVETR

SEQ ID NO: 3829 - protein, 40 aa, Artificial Sequence
  Synthetic
TTKFKVTDKKQAKEWQEWAKKQGLQFKITQTNGTWHVHVE

SEQ ID NO: 3830 - protein, 43 aa, Artificial Sequence
  Synthetic
QTVHVGNETYHFSDPREVEEFVKKVAKDLNLRVEQHGNTFHVS

SEQ ID NO: 3831 - protein, 40 aa, Artificial Sequence
  Synthetic
ETEYEYTSPQEAEEARREAEERGKTVTVETTNGKVRLRIR

SEQ ID NO: 3832 - protein, 43 aa, Artificial Sequence
  Synthetic
GTVKVNGETYTAPSPEEAKKIAQKLAKKYNTTYTVKNGTFEVK

SEQ ID NO: 3833 - protein, 40 aa, Artificial Sequence
  Synthetic
TVTITVTDKREADRVAEEAKKKGRTVTVTKKNGTFEVRYD

SEQ ID NO: 3834 - protein, 40 aa, Artificial Sequence
  Synthetic
SYRYTVHGEEDLKRIYKMLADMNLEVHYEEKNGQIIVQAD

SEQ ID NO: 3835 - protein, 40 aa, Artificial Sequence
  Synthetic
ALHIKTDGKEQAEDWAKKAEDRNLEYEIRVHNGKWVVTIK

SEQ ID NO: 3836 - protein, 43 aa, Artificial Sequence
  Synthetic
STEEKVKKVEEVLKNNQPLHVDGQQYDDPKEVEKVLRRLRKEL

SEQ ID NO: 3837 - protein, 43 aa, Artificial Sequence
  Synthetic
KQVHVGNVTYDFNNPEEVEKFAKEVAKKLGLQVHFHGDHVEMH

SEQ ID NO: 3838 - protein, 43 aa, Artificial Sequence
  Synthetic
DEEIKKKIRELQKNGVESVTVNGIEIELKDEDDVVRKIEEVRG

SEQ ID NO: 3839 - protein, 40 aa, Artificial Sequence
  Synthetic
TQTITTTNKENAEQIAREAKKKGLDVTIRKNNGTWEIHWD

SEQ ID NO: 3840 - protein, 43 aa, Artificial Sequence
  Synthetic
DKEEYKERVKELIKQGNEEEAKKVVKRAGVSDEEWKDIRRKVL

SEQ ID NO: 3841 - protein, 43 aa, Artificial Sequence
  Synthetic
TTVHVNNVTYHFDNPEEMEKFAQEVAKKLGMTIEYHGETLKIT

SEQ ID NO: 3842 - protein, 40 aa, Artificial Sequence
  Synthetic
TQELTFDDPTQARKAAKKLKKNNQTFTLQEHGNRVTIHVQ

SEQ ID NO: 3843 - protein, 41 aa, Artificial Sequence
  Synthetic
IHVNGETYTFPSPEAAQKAAEELAKKYNLTVHTDGDTVKVK

SEQ ID NO: 3844 - protein, 43 aa, Artificial Sequence
  Synthetic
DPEKEEIEKEIRKKQLRTITINGITVTADDPRQLAQLALDAKR

SEQ ID NO: 3845 - protein, 43 aa, Artificial Sequence
  Synthetic
TRVYVNGKEITADTDEAAQKIAEKLAKIYNLTVHVKNGKFEVQ

SEQ ID NO: 3846 - protein, 43 aa, Artificial Sequence
  Synthetic
TTVVVKGQEYKFDTEEEVKKFVKKVVESLGVPVTREGDTWHVG

SEQ ID NO: 3847 - protein, 40 aa, Artificial Sequence
  Synthetic
KIQYHVDGEEKAKEVAKELKKQNLEVHVRVENGRFIIEAS

SEQ ID NO: 3848 - protein, 40 aa, Artificial Sequence
  Synthetic
RIKYTFDGKENAKKFADEMKKHNLHAELHVDGDQWVVHVE

SEQ ID NO: 3849 - protein, 43 aa, Artificial Sequence
  Synthetic
KEVTWNGVTVTFSNPEEVEKYAKEVAKKLNLEIHVEGDQIKMK

SEQ ID NO: 3850 - protein, 43 aa, Artificial Sequence
  Synthetic
ATVKVDGVEYHFDEPEQAKRFAKELAKKKNRKVKIHGDEIRIE

SEQ ID NO: 3851 - protein, 43 aa, Artificial Sequence
  Synthetic
RELEERAKKLIKKANGNTSKAEKLAEDSGNDELKKVIRELEER

SEQ ID NO: 3852 - protein, 43 aa, Artificial Sequence
  Synthetic
ATVKMGNKTWHFSNPEEAEKFARELATRKNLEVETHNGTFQMK

SEQ ID NO: 3853 - protein, 40 aa, Artificial Sequence
  Synthetic
RYTIRVTGEEAAKAVIKMAKERNLSVKVEHHGDDVILHLE

SEQ ID NO: 3854 - protein, 43 aa, Artificial Sequence
  Synthetic
DIEEKIKKVEEVVKKNQPVTIDGQTITDVDKIRKILEKLRRDL

SEQ ID NO: 3855 - protein, 43 aa, Artificial Sequence
  Synthetic
SVEEILSKVKEVIDQNKTFHYGNLTVTSEEDLKKLEKELRKKS

SEQ ID NO: 3856 - protein, 43 aa, Artificial Sequence
  Synthetic
KEVHVNGVTYTFPNPEEAKKFVAKVAKSQNLKVEFHGDTIKIE

SEQ ID NO: 3857 - protein, 43 aa, Artificial Sequence
  Synthetic
TEDDKRKLAREAAKRGEPIKIDGVEYTTPEEVKRALEELERRI

SEQ ID NO: 3858 - protein, 43 aa, Artificial Sequence
  Synthetic
PEEIKKILQEALERGVDPEQAIEIAHRNGADHSEARRALEELL

SEQ ID NO: 3859 - protein, 43 aa, Artificial Sequence
  Synthetic
DEDEEKIRTHVERHNIRTVTINGQTYTVDDPTEVVKILYKLKK

SEQ ID NO: 3860 - protein, 43 aa, Artificial Sequence
  Synthetic
SEKAKEIVKEAQKKNIKRVTINGITVEAPDDKTLEKLIEQAIK

SEQ ID NO: 3861 - protein, 43 aa, Artificial Sequence
  Synthetic
PEVEKRIRQKLKDGKTVKLTVNGETYEVTTEEDARRAREALES

SEQ ID NO: 3862 - protein, 40 aa, Artificial Sequence
  Synthetic
EETYTLHGEEQIKRAIEIAKKRNLRVEVERRGDQAVVTFK

SEQ ID NO: 3863 - protein, 43 aa, Artificial Sequence
  Synthetic
SQDQIDKLAKLAIERGITFTINGKTYTNPEQLKYAAEVYVKRL

SEQ ID NO: 3864 - protein, 43 aa, Artificial Sequence
  Synthetic
TKVNVNGKTYTFDNPEKAKQFAKEAAKKANAQVTIRGPTITVT

SEQ ID NO: 3865 - protein, 43 aa, Artificial Sequence
  Synthetic
SEDEIKKEIKRALDEGNEDEATKLAKKLANSDDEIKKLKKEIK

SEQ ID NO: 3866 - protein, 43 aa, Artificial Sequence
  Synthetic
PEDQIRKDAKELLKNGNKDKARELLQRAGYSPEQAERIAKKIT

SEQ ID NO: 3867 - protein, 40 aa, Artificial Sequence
  Synthetic
TTTYETTDETEARRYAKEAASEGRTVEIRKHNGRFRVRVE

SEQ ID NO: 3868 - protein, 40 aa, Artificial Sequence
  Synthetic
EEEIEVHGDEQAKKHKEMAERRNLEVHITKHNGKIIVHLK

SEQ ID NO: 3869 - protein, 43 aa, Artificial Sequence
  Synthetic
KTVHVNNTTFHFETPEEAKKYAQELAKKLNLTVTVDGNEIQIH

SEQ ID NO: 3870 - protein, 43 aa, Artificial Sequence
  Synthetic
KPDEAQEKAEKLAKKGQKFTFAGITVTSPEEAKKLIQYIREKY

SEQ ID NO: 3871 - protein, 43 aa, Artificial Sequence
  Synthetic
TEQEKRLEKLADEIGVTRDAIKEAYKKANGNEEKAERIARKIK

SEQ ID NO: 3872 - protein, 40 aa, Artificial Sequence
  Synthetic
SVTYTTDNEEKAKEVMKWAKKQNLEVHVKTENNRWIVTAD

SEQ ID NO: 3873 - protein, 43 aa, Artificial Sequence
  Synthetic
PDKAKQIAEDLARKGQSKDEIEKILRKAGASPEEIKRAKKYLG

SEQ ID NO: 3874 - protein, 41 aa, Artificial Sequence
  Synthetic
KTVTVNGETYTVTSIEEAKKLAKKLGATSVTVDGDTIEVRK

SEQ ID NO: 3875 - protein, 40 aa, Artificial Sequence
  Synthetic
SQTYTFEGEEQARRMEEHAKKHNLEVEVREHNGHFVLHIE

SEQ ID NO: 3876 - protein, 43 aa, Artificial Sequence
  Synthetic
TTVKFDNYQVDFNNPEQAKKFAEEVARKLGRTYELHNGTIHIE

SEQ ID NO: 3877 - protein, 43 aa, Artificial Sequence
  Synthetic
DVREIEDTLRKQGTTLTITLNGRTYEVEPGDEHVLKLLKQWVS

SEQ ID NO: 3878 - protein, 40 aa, Artificial Sequence
  Synthetic
EVTYTSEGEEQARMWYKILAAQNLEVHIEVHNGRWIIKAS

SEQ ID NO: 3879 - protein, 43 aa, Artificial Sequence
  Synthetic
PEDEKRKKIKKLIKSGNTEAAKKLAKKAGYTEEWAERLKKKVL

SEQ ID NO: 3880 - protein, 43 aa, Artificial Sequence
  Synthetic
EANEVVRRAKEALKNGQPFKYGGVEVRTDQDAEELRRILEERS

SEQ ID NO: 3881 - protein, 43 aa, Artificial Sequence
  Synthetic
EQRAAKIVLEAIKNGITHITVDGIDYDASNPEVEKRARELAKG

SEQ ID NO: 3882 - protein, 43 aa, Artificial Sequence
  Synthetic
GKLTVNGKTYTFPSWKEAQKAAEKLAKKLNLQVQIHGNTLKVT

SEQ ID NO: 3883 - protein, 43 aa, Artificial Sequence
  Synthetic
DVETTLKEVAKRGESITVHVNGQQFHVRPNDPEAVKEILKKVM

SEQ ID NO: 3884 - protein, 41 aa, Artificial Sequence
  Synthetic
TTLTINGETYTFPSLTEAERFAREAGAKEIEIRGTTITVRE

SEQ ID NO: 3885 - protein, 41 aa, Artificial Sequence
  Synthetic
HRVDFNGEKYESSDSEEARRRARNAGARREQTDGNETRLTG

SEQ ID NO: 3886 - protein, 43 aa, Artificial Sequence
  Synthetic
TTVKVNGKEYTFQTPKQAKEFAEKIAKKDNLTVHVHGDTITVE

SEQ ID NO: 3887 - protein, 43 aa, Artificial Sequence
  Synthetic
SEQELRERAREALRNGDEEKARRIAKKAGISEDELRELEKKAK

SEQ ID NO: 3888 - protein, 43 aa, Artificial Sequence
  Synthetic
EQKELEKKARELAKNGNKDKAEEVLRRAGVSEDEIEEIKKEVD

SEQ ID NO: 3889 - protein, 40 aa, Artificial Sequence
  Synthetic
SVTFHTHGPEQAKEVAKKLKEQNLEVHIERHGDQWVIHAS

SEQ ID NO: 3890 - protein, 40 aa, Artificial Sequence
  Synthetic
AYTYTFNGPEQAKHMIKILRAMNLELHVETKNGQIIVTAE

SEQ ID NO: 3891 - protein, 40 aa, Artificial Sequence
  Synthetic
TEEYEYDDETAARTAYETARKNGLDVRYTKSGGKYRVEIR

SEQ ID NO: 3892 - protein, 40 aa, Artificial Sequence
  Synthetic
KFTITTDGEEQAKKVYKMAVKRNLHVEIHVHNGKFHLTVE

SEQ ID NO: 3893 - protein, 43 aa, Artificial Sequence
  Synthetic
TKIFIGNETYTAPSPEEAKKIAQKLAEEAGLEVQNHNGRFEIH

SEQ ID NO: 3894 - protein, 43 aa, Artificial Sequence
  Synthetic
KKVTLGNKTYEFPNPEEAKKFAKKAAKKYNLEVHIDGNKITVQ

SEQ ID NO: 3895 - protein, 40 aa, Artificial Sequence
  Synthetic
RYTYTVEGEEQVKEILEKLARMNLQVKVEVHNGQYIIHAE

SEQ ID NO: 3896 - protein, 43 aa, Artificial Sequence
  Synthetic
TQVHVNGLTYTFSSPEEAAKFAKEVAKKQNLQVHFHGETIKVE

SEQ ID NO: 3897 - protein, 41 aa, Artificial Sequence
  Synthetic
TTVTFKGQTFTFRSDEEAERWAKKQGVTSIQKDGTTITLHG

SEQ ID NO: 3898 - protein, 43 aa, Artificial Sequence
  Synthetic
SDEEKKKFEEAKNQEEVKTDNRQEVDARDEELLKELERRARKG

SEQ ID NO: 3899 - protein, 43 aa, Artificial Sequence
  Synthetic
KQVHVNGKTYTFPNPELAKKFAKKAAKKLGGTVTVHGNTVQVH

SEQ ID NO: 3900 - protein, 40 aa, Artificial Sequence
  Synthetic
EIQIHLTGEEQARRMEKVARAHNLEIHIEVRGDEFILHLK

SEQ ID NO: 3901 - protein, 43 aa, Artificial Sequence
  Synthetic
KEVRVGNYTYHFDNPDKARKVAEKLAKKYNLKVTEKNGTFKVE

SEQ ID NO: 3902 - protein, 43 aa, Artificial Sequence
  Synthetic
KTFTVGTTTYTAPSPDAAKELAQQWANKYNLTVHVDGDTVTVK

SEQ ID NO: 3903 - protein, 40 aa, Artificial Sequence
  Synthetic
AVTYTMPGEEAARKFVEEMKRRNLTAELHVENGEWVVTVK

SEQ ID NO: 3904 - protein, 43 aa, Artificial Sequence
  Synthetic
LEEVAKYIKKLVKQGILDVTYNGITVTATSKDEAKKLADKVAG

SEQ ID NO: 3905 - protein, 43 aa, Artificial Sequence
  Synthetic
KEVQINGLHYQVDTQEEAIKLAKKLAKKAGLKVTVHGETIQVH

SEQ ID NO: 3906 - protein, 43 aa, Artificial Sequence
  Synthetic
HHVHIGNTTYTASSKQEAQELAKKAAQKLNLTVETFGNYVQVE

SEQ ID NO: 3907 - protein, 43 aa, Artificial Sequence
  Synthetic
TTVNNNGQKYTASSPEEAQKIAEKLAKKYNLTVTKKNGNFTVT

SEQ ID NO: 3908 - protein, 43 aa, Artificial Sequence
  Synthetic
GTVIVNGKEVHFETEEEVEKFVKTVASRLGLEVREKDGTWELH

SEQ ID NO: 3909 - protein, 43 aa, Artificial Sequence
  Synthetic
QTVHVNGKTYKFDTPEAAAKFAKKVAKKAGLTVEVHGTTIEVH

SEQ ID NO: 3910 - protein, 43 aa, Artificial Sequence
  Synthetic
GTVQFGNKEWHFDDPEQVKEFVKKLVSKHNVTYEEHNGTIHLS

SEQ ID NO: 3911 - protein, 43 aa, Artificial Sequence
  Synthetic
DWEKLKEEAERRLKNGQTVEVNGIRVTNPEEARRVLEQLKKDA

SEQ ID NO: 3912 - protein, 43 aa, Artificial Sequence
  Synthetic
GTLKVNGKTYTFPSLDAAKKWAEKLAKKLNRTVTLKNGTWHLK

SEQ ID NO: 3913 - protein, 43 aa, Artificial Sequence
  Synthetic
PYQKLIKLAKEAAKKGQTFEVAGIKVTTEEEAKKAAEYLKKQA

SEQ ID NO: 3914 - protein, 43 aa, Artificial Sequence
  Synthetic
GKVVVGDTTYKYPTTEEAQKVAKKLAKEYNLTVHIDGNTVKVK

SEQ ID NO: 3915 - protein, 43 aa, Artificial Sequence
  Synthetic
PEDIRKELEERLKNGVTPEELKKIAEKRNDKDASKWAEKVLRT

SEQ ID NO: 3916 - protein, 43 aa, Artificial Sequence
  Synthetic
WTVDVQGVKYTFDEPEQVKKFVDEVAKKLQLKVEFHGNTVHVE

SEQ ID NO: 3917 - protein, 43 aa, Artificial Sequence
  Synthetic
QPKELEKKAKEAIKNGNRDKARDLLRKAGYSDDEAEKIIRKIE

SEQ ID NO: 3918 - protein, 40 aa, Artificial Sequence
  Synthetic
TKTIQVTDRREAERVRQELEDKGLRVEVHEDNGRFELRTT

SEQ ID NO: 3919 - protein, 43 aa, Artificial Sequence
  Synthetic
DWKETVERVSKTGTGYTLNINGQQYHIPPGDEDSLRTLLKRIF

SEQ ID NO: 3920 - protein, 43 aa, Artificial Sequence
  Synthetic
PDEAEKRARELQKRGVSSDEIRELLQRWGASDEEIERIEKELN

SEQ ID NO: 3921 - protein, 43 aa, Artificial Sequence
  Synthetic
RKEDAKEKFKKAVSNGNDEKAERLAKKAGLSEEDKKRLRKQAG

SEQ ID NO: 3922 - protein, 43 aa, Artificial Sequence
  Synthetic
QTVHVGNVTFHFDEPEQAKKFAEEMAKKLGMTIQVHGDHIRVE

SEQ ID NO: 3923 - protein, 43 aa, Artificial Sequence
  Synthetic
ATVHVNGVQYHFKTLEEMKEFVEKVAKTLQLRVEYHGNTVHIE

SEQ ID NO: 3924 - protein, 40 aa, Artificial Sequence
  Synthetic
TKFIKVDNQEAAKKYAQELAEKGIEVHVTQINGTWVVESK

SEQ ID NO: 3925 - protein, 43 aa, Artificial Sequence
  Synthetic
SSKAQKIAEELKRKGYSPEQIEKILRKLGVSPEEAEEAKRYAI

SEQ ID NO: 3926 - protein, 41 aa, Artificial Sequence
  Synthetic
HTVQINGQTFTVTNEDEAKELAKRIGANTITRDGTRFEVRT

SEQ ID NO: 3927 - protein, 43 aa, Artificial Sequence
  Synthetic
REDVRKLAEKLIRNGVTQFTVNGVEVQVTNKDEAAKLIEKALG

SEQ ID NO: 3928 - protein, 43 aa, Artificial Sequence
  Synthetic
AQVHVNGVTYTFDEPEQAKEFAKKVAEKLGREVEIHGDRVEIK

SEQ ID NO: 3929 - protein, 43 aa, Artificial Sequence
  Synthetic
SKDEKRERAKKNNQSITVTLKGITLTLTGYSKEDAKRIIEKLK

SEQ ID NO: 3930 - protein, 43 aa, Artificial Sequence
  Synthetic
STVHVNGTTYNASSLKEAIEFAQKLAKKLGAEVQVHGQTVKLQ

SEQ ID NO: 3931 - protein, 40 aa, Artificial Sequence
  Synthetic
RYTWESDGEEQMEKAIRIAKAMNLEVHVRVEGNKWVVTAE

SEQ ID NO: 3932 - protein, 43 aa, Artificial Sequence
  Synthetic
TQVLIGDTTYTFDNPEQAQKFAEEAAEKYNAPVSLHNGTFKLH

SEQ ID NO: 3933 - protein, 43 aa, Artificial Sequence
  Synthetic
TTVKVNGLTFTASSPDEAYKYAKELAEKLGLTVHKHGNTVQVH

SEQ ID NO: 3934 - protein, 43 aa, Artificial Sequence
  Synthetic
TEVQVGDKTYHYDTTDKAIKAAKKIAKKLGLTYHVEGNKVTIK

SEQ ID NO: 3935 - protein, 43 aa, Artificial Sequence
  Synthetic
SEDEKDELRERARRGESTDEAKKRAKELGDDKLAKEIEELKKK

SEQ ID NO: 3936 - protein, 40 aa, Artificial Sequence
  Synthetic
RVTRTFDGEEQARKFVEKAKKQNLEVHIKVENGKYIATAE

SEQ ID NO: 3937 - protein, 43 aa, Artificial Sequence
  Synthetic
SEEEKALRAAEKQNTTEYTLNNKVTVRAGDEELERRIRKKEKG

SEQ ID NO: 3938 - protein, 43 aa, Artificial Sequence
  Synthetic
ATVDVDGVTYHFSSPEQVRRFAEEYAKKHNRRLEVHNGKFRVE

SEQ ID NO: 3939 - protein, 40 aa, Artificial Sequence
  Synthetic
TTTITVTNPENARRLEEKLRRKGLEVEVRVDNGEVRVRIR

SEQ ID NO: 3940 - protein, 43 aa, Artificial Sequence
  Synthetic
GKVVIGDTTYTFPNPEAAEKWAQKLAKKAGKTVTKKNGTWKVE

SEQ ID NO: 3941 - protein, 43 aa, Artificial Sequence
  Synthetic
LTVRWKGYEVTFNNPEEAQKFVEEVAKKIGGTVELHNGTYHID

SEQ ID NO: 3942 - protein, 40 aa, Artificial Sequence
  Synthetic
TKTIRVDDEEEAKKVRKELEKNGQPAQVEEKNGRYEVKFD

SEQ ID NO: 3943 - protein, 40 aa, Artificial Sequence
  Synthetic
KLTWTVEGEEQVRRLEKMVKDMNLQVKVERQGDKWVVHAE

SEQ ID NO: 3944 - protein, 43 aa, Artificial Sequence
  Synthetic
NTVKFDNYEYHFNNPEEALKMALEVAKKKGGEIDYKDGTFQIK

SEQ ID NO: 3945 - protein, 43 aa, Artificial Sequence
  Synthetic
TAEEAIKALQKAIKKGKPVTFGNVTVTSADEAQKAIKKLQKQL

SEQ ID NO: 3946 - protein, 40 aa, Artificial Sequence
  Synthetic
SITIQVEGEEQAKKVIEWAKKQNLEVHVEKKNGRIHLTAD

SEQ ID NO: 3947 - protein, 43 aa, Artificial Sequence
  Synthetic
TTVQIGDITIKTDNTDEAKKIAEKYAKEYNLKLTEKNGNYQVH

SEQ ID NO: 3948 - protein, 43 aa, Artificial Sequence
  Synthetic
SQEDAKKKAEEAVKNNNDEKAKRILENAGITPEEAEKIIEKIK

SEQ ID NO: 3949 - protein, 43 aa, Artificial Sequence
  Synthetic
TTIKVNGKEYQAPSDDAAKKVAEKLAKKYNGTFTVKNGTFEVH

SEQ ID NO: 3950 - protein, 43 aa, Artificial Sequence
  Synthetic
PEEELRKRAEEALRRGDPETAKELAQRAGDEDLAQEIEKIRKG

SEQ ID NO: 3951 - protein, 43 aa, Artificial Sequence
  Synthetic
REEDKLRKVREAEKKKQEITIDGKRVTSPEEAKKVAEELERRL

SEQ ID NO: 3952 - protein, 40 aa, Artificial Sequence
  Synthetic
EETIEVDGEEKAKKVKKMLEARNLEVEIHEHNGKFILTAR

SEQ ID NO: 3953 - protein, 43 aa, Artificial Sequence
  Synthetic
GTVKLGDVKVTFPNPQLAKKYAQKLADKAGGTVHKFGNTFQVK

SEQ ID NO: 3954 - protein, 43 aa, Artificial Sequence
  Synthetic
TTVHVNGQEYTASSPEEAKKIAEKIAQKLNAQVKVKNGQFFVE

SEQ ID NO: 3955 - protein, 40 aa, Artificial Sequence
  Synthetic
RVTWHVEGDEQLKKALKIAKDQNLEVHYEKHGDKYIITAD

SEQ ID NO: 3956 - protein, 40 aa, Artificial Sequence
  Synthetic
RKTWTFDGPEDAKKMIEDLKRKNLTVHVEVRGNKVIVTAE

SEQ ID NO: 3957 - protein, 43 aa, Artificial Sequence
  Synthetic
SDEDKARELKKKADNNEPVKIGTQEYRDPDRIKEAAERYRRKY

SEQ ID NO: 3958 - protein, 43 aa, Artificial Sequence
  Synthetic
DDDEKQRIEEEARNTDRLEVNGQIEVDGNNDEAIKRAKKLADK

SEQ ID NO: 3959 - protein, 40 aa, Artificial Sequence
  Synthetic
TESYKTTDRNEAEKLRQKAEDEGRRVTVRKENGTYEVRVD

SEQ ID NO: 3960 - protein, 40 aa, Artificial Sequence
  Synthetic
DITIQVDGPEKVEKIYRALAKQNLDVEVQVHNGKYVVHAR

SEQ ID NO: 3961 - protein, 43 aa, Artificial Sequence
  Synthetic
KTVNFGNYQWHYPTPEAAAKAAKKLAEKYNVPFTVRGNTVTLG

SEQ ID NO: 3962 - protein, 43 aa, Artificial Sequence
  Synthetic
HKVDVNGKTFTASSSDEAKKIAEYYAKLNNLTVKKFGDTFQVH

SEQ ID NO: 3963 - protein, 43 aa, Artificial Sequence
  Synthetic
SRDELRKRLKELAKNGQPVRVGNIEVTTEEEAERLAELLARQS

SEQ ID NO: 3964 - protein, 40 aa, Artificial Sequence
  Synthetic
EITFTTQGEEDMKRVIKWAKKQNLEVHVRQEGNQWVLDAR

SEQ ID NO: 3965 - protein, 43 aa, Artificial Sequence
  Synthetic
PPAEEAAKEAIKKNTKLTITVNGVTFHITSQDAAKKVAQWAKN

SEQ ID NO: 3966 - protein, 40 aa, Artificial Sequence
  Synthetic
STDITVDDSTAAKEVKRRAEEKGLTVEIRKINGTWIVRIE

SEQ ID NO: 3967 - protein, 43 aa, Artificial Sequence
  Synthetic
GTIYVGNTTYTAPTQDLAQKIAEEIAKKLGLTVHVDGNTFQLK

SEQ ID NO: 3968 - protein, 43 aa, Artificial Sequence
  Synthetic
KTVFVNGQSYDFDDPTEVEKFVKTVAKTLGLQVERHGDELHLK

SEQ ID NO: 3969 - protein, 43 aa, Artificial Sequence
  Synthetic
PIEELLRTVEEVRKKKGSVTVNGTNFTDDSELKQLYKELREKL

SEQ ID NO: 3970 - protein, 40 aa, Artificial Sequence
  Synthetic
TETRTFDSEEEAKKAQKEAEKQGRTVTITRRDDRWEVRFD

SEQ ID NO: 3971 - protein, 43 aa, Artificial Sequence
  Synthetic
DLRETIKTVEEVLRKGQPVDYNGKTFTDPNEIKKLLEELQRKA

SEQ ID NO: 3972 - protein, 40 aa, Artificial Sequence
  Synthetic
SITIETHGEEDIKRVLEEAKKMNLEVHVEQHGDKYVLHIE

SEQ ID NO: 3973 - protein, 43 aa, Artificial Sequence
  Synthetic
SYQEVEKVVEHIEKTGQGITVNGQKFDDAKELEEYVKELRKKE

SEQ ID NO: 3974 - protein, 43 aa, Artificial Sequence
  Synthetic
DETEVKRRVEELKKKNITITVNGQEYHDEEELKKVVRTQLSKS

SEQ ID NO: 3975 - protein, 41 aa, Artificial Sequence
  Synthetic
TTVEFNGQRYTVTTWKEAEKLARKYGATTVTVDGTRVEIRK

SEQ ID NO: 3976 - protein, 43 aa, Artificial Sequence
  Synthetic
KQVLVNGTTYKFPTPEAAQKFAEKAAKKYGLTLRLKNGTFHLK

SEQ ID NO: 3977 - protein, 43 aa, Artificial Sequence
  Synthetic
GTVHVNGVTYHFENPEKMKEFADKVARKLGLTYELKDDTIHVE

SEQ ID NO: 3978 - protein, 43 aa, Artificial Sequence
  Synthetic
KPEEAERLAKQFKKEGKTLKLDGQEYTTPEEIRKAAEEILRRK

SEQ ID NO: 3979 - protein, 43 aa, Artificial Sequence
  Synthetic
LTVTFDGITYHFNNPEEAKKMVDEVVKKKNGRVELHNGQYHIE

SEQ ID NO: 3980 - protein, 40 aa, Artificial Sequence
  Synthetic
TLFIGNTTYTFDNPKEAIEFAKKYGAKQVHLHGNKVEVQT

SEQ ID NO: 3981 - protein, 43 aa, Artificial Sequence
  Synthetic
GTVKLGDLTLHYPTPDEAKKAAEKAAKKYNLQVEQHGNTWHIE

SEQ ID NO: 3982 - protein, 43 aa, Artificial Sequence
  Synthetic
IEVVERLKKVQKDNRPITVTYNGETYTVTSPEEVETLVRRLES

SEQ ID NO: 3983 - protein, 43 aa, Artificial Sequence
  Synthetic
RTVKVNGRTYTFPNPELAQKFAEKIAKELNKPVTVENGTYTVE

SEQ ID NO: 3984 - protein, 43 aa, Artificial Sequence
  Synthetic
SIDKALKLAKKAAKNNTSVTINGITFDNPQEALKYAKKLLKKK

SEQ ID NO: 3985 - protein, 40 aa, Artificial Sequence
  Synthetic
TIKITVDDQEEAKKVKKKAQKNGLEVHLHQDGNTITIHIN

SEQ ID NO: 3986 - protein, 43 aa, Artificial Sequence
  Synthetic
KTVDVKGVKYTFDNPEEAVKFAEKVAKSLGGTYEIKGDQIDVD

SEQ ID NO: 3987 - protein, 43 aa, Artificial Sequence
  Synthetic
KTVHVGTETYHFDDPNQAKKFAKEMAKKLNLRIEHHGDTIHVE

SEQ ID NO: 3988 - protein, 40 aa, Artificial Sequence
  Synthetic
GTTYTFEGEEQMRKMAEIAKRQNLEVHIEIRGNRYIVHLH

SEQ ID NO: 3989 - protein, 40 aa, Artificial Sequence
  Synthetic
EYHWEVTGEEQARRAQEHAQRMNLDAQIEVHGDKYIVKAH

SEQ ID NO: 3990 - protein, 43 aa, Artificial Sequence
  Synthetic
TTVTINGVNYTFDNPEEAKEFAEKMAKKAGLQVEFHGEEIRIE

SEQ ID NO: 3991 - protein, 43 aa, Artificial Sequence
  Synthetic
TTVHFNNVEYHFDNPEEAERMAKELAKKAGLEVHVENGHFKIE

SEQ ID NO: 3992 - protein, 43 aa, Artificial Sequence
  Synthetic
NEEVEKIYRELKRRGVDPREVEKILKRQGIDDREVEEVKQKVD

SEQ ID NO: 3993 - protein, 43 aa, Artificial Sequence
  Synthetic
TPAAELAKKAVKTGQPVTVQFNGITITVTSPEEAKKLIKKIKN

SEQ ID NO: 3994 - protein, 43 aa, Artificial Sequence
  Synthetic
DEKVKKTVERLLKNGVDERQVQDTLRRQGVDPRRVREVIRRIS

SEQ ID NO: 3995 - protein, 43 aa, Artificial Sequence
  Synthetic
SDETRKIAEKLKKNGVSPEEIRKELEKAGASPDLAEKLAREAG

SEQ ID NO: 3996 - protein, 43 aa, Artificial Sequence
  Synthetic
KTVHINGYTYHFENPEQAKKFVEEVAKKLGLTFELRGNTFHVE

SEQ ID NO: 3997 - protein, 43 aa, Artificial Sequence
  Synthetic
ADEAEKIAKQLQKDGVNPDQIEEILQRLGVSPEEAKEIAKKIK

SEQ ID NO: 3998 - protein, 40 aa, Artificial Sequence
  Synthetic
TTTYTYTDKEAAQKAAKEAQKNNIEYQLTKQNGTWQVTLK

SEQ ID NO: 3999 - protein, 40 aa, Artificial Sequence
  Synthetic
AITYTMDGDEQAKRVEKMLKKRNLEFEIRRHGDQWVINVH

SEQ ID NO: 4000 - protein, 43 aa, Artificial Sequence
  Synthetic
TQVEFNGTTYQASSQEEAKKVAKKAAKIWNLTVHIHGDTIKLT

1. A non-naturally occurring polypeptide comprising
(a) 3-5 secondary structure elements, wherein each secondary structure element is either an α-helix (H domain) of between 10-20 amino acid residues in length or a β-strand (E domain) of between 3-10 amino acid residues in length; and
(b) 2-4 linkers of between 2 to 6 amino acid residues in length connecting adjacent secondary structure elements;
wherein the polypeptide is between 25-50 amino acid residues in length; and
wherein the polypeptide includes no cysteine residues.

2. The polypeptide of claim 1, wherein each H domain is independently between 10-15 amino acids in length.

3. The polypeptide of claim 1, wherein each E domain is independently between 3-7 amino acids in length.

4. The polypeptide of claim 1, wherein the polypeptide is between 30-50, 35-50, 35-45, 40-45, or 40-43 amino acid residues in length.

5. The polypeptide of any claim 1, wherein the polypeptide comprises a secondary structure element arrangement selected from the group consisting of HHH, EHEE, HEEH, and EEHEE.

6. The polypeptide of claim 1, wherein the polypeptide comprises an amino acid sequence having at least 30% identity along its length to the amino acid sequence selected from the group consisting of SEQ ID NOS:1-4000, or a mirror image thereof.

7. The polypeptide of claim 1, wherein the polypeptide comprises an amino acid sequence having at least 50% identity along its length to the amino acid sequence selected from the group consisting of SEQ ID NOS:1-4000, or a mirror image thereof.

8. The polypeptide of claim 1, wherein the polypeptide comprises an amino acid sequence having at least 80% identity along its length to the amino acid sequence selected from the group consisting of SEQ ID NOS:1-4000, or a mirror image thereof.

9. The polypeptide of claim 1, wherein the polypeptide comprises an amino acid sequence having at least 90% identity along its length to the amino acid sequence selected from the group consisting of SEQ ID NOS:1-4000, or a mirror image thereof.

10. The polypeptide of claim 1, wherein the polypeptide comprises an amino acid sequence having at least 95% identity along its length to the amino acid sequence selected from the group consisting of SEQ ID NOS:1-4000, or a mirror image thereof.

11. The polypeptide of claim 1, wherein the polypeptide comprises an amino acid sequence selected from the group consisting of SEQ ID NOS:1-4000, or a mirror image thereof.

12. An isolated nucleic acid encoding the polypeptide of claim 1.

13. A recombinant expression vector comprising the isolated nucleic acid of claim 12 operatively linked to a promoter.

14. A recombinant host cell comprising the recombinant expression vector of claim 13.

15. A method, comprising:
(a) using a computing device to construct a library of proteins, wherein the computing device designs a sequence to stabilize the backbone of the protein, and wherein the proteins comprise less than about 50 amino acids;
(b) synthesizing the proteins using next-generation gene synthesis;
(c) expressing the proteins in yeast so that every cell displays many copies of one protein sequence on its surface; and
(d) screening the library of proteins for susceptibility to digestion by protease.

16. The method of claim 15, wherein the synthesizing step comprises oligo library synthesis technology, capable of parallel synthesis of 104-105 arbitrarily specified DNA sequences long enough to encode the proteins.

17. The method of claim 15, wherein in the screening step, cells are incubated with varying concentrations of protease, those displaying resistant proteins are isolated by fluorescence-activated cell sorting (FACS), and the frequencies of each protein at each protease concentration are determined by deep sequencing.

18. The method claim 15, the method further comprising assigning each protein a stability score, wherein the stability score comprises: the difference between the measured EC₅₀ and the predicted EC₅₀ in the unfolded state of the protein, according to a sequence-based model parameterized using EC₅₀ measurements of scrambled sequences.

19. The method of claim 18, wherein a stability score of 1 corresponds to a 10-fold higher EC₅₀ than the predicted EC₅₀ in the unfolded state.

20. The method of claim 15, wherein the library comprises 1,000 to 30,000 proteins.
